(19) United States
(12) Patent Application Publication
(10) Pub. No.: US 2025/0387518 A1
(43) Pub. Date: Dec. 25, 2025

(54) COMPOSITIONS AND METHODS FOR EPIGENETIC REGULATION OF B2M EXPRESSION

(71) Applicant: nChroma Bio, Inc., Boston, MA (US)

(72) Inventors: Jamie Lynn Schafer, Boston, MA (US); Noorussahar Abubucker, Watertown, MA (US); Ricardo Noel Ramirez, Hyde Park, MA (US); Ari Friedland, Cambridge, MA (US); Morgan Maeder, Waban, MA (US); Vic Myer, Arlington, MA (US)

(73) Assignee: nChroma Bio, Inc., Boston, MA (US)

(21) Appl. No.: 18/877,796

(22) PCT Filed: Jun. 23, 2023
(86) PCT No.: PCT/US2023/069029

§ 371 Date: Dec. 20, 2024

Related U.S. Application Data
(60) Provisional application No. 63/355,061, filed on Jun. 23, 2022.

(51) Int. Cl. A61K 48/00; C12N 9/10; C12N 9/22; C12N 15/11

(52) U.S. Cl. CPC A61K 48/0066; A61K 48/0041; A61K 48/0058; C12N 9/1007; C12N 9/226; C12N 15/11; C12Y 201/01037; C07K 2319/00; C12N 2310/20

(57) ABSTRACT

Disclosed herein are compositions and methods comprising epigenetic editors for epigenetic modification of B2M, as well as nucleic acids and vectors encoding the same. Also disclosed are cells epigenetically modified by the epigenetic editors.

### CROSS-REFERENCE TO RELATED APPLICATIONS

[0001] This application claims the benefit under 35 U.S.C. § 119(e) of U.S. Provisional Application No. 63/355,061, filed Jun. 23, 2023, entitled “COMPOSITIONS AND METHODS FOR EPIGENETIC REGULATION OF B2M EXPRESSION,” the entire disclosure of each of which is hereby incorporated by reference in its entirety.

### REFERENCE TO AN ELECTRONIC SEQUENCE LISTING

[0002] The contents of the electronic sequence listing (C169870008WO00-SEQ-AXW.xml; Size: 1,879,683 bytes; and Date of Creation: Jun. 23, 2023) is herein incorporated by reference in its entirety.

### BACKGROUND

[0003] Adoptive cell therapy using genetically engineered immune cells has emerged as a promising approach to treat cancer, infections, autoimmune diseases, and other disorders. However, traditional genetic engineering strategies typically rely on permanent manipulation of cells at the genomic level, which is associated with certain risks, including, for example, chromosomal translocations, undesired insertions and deletions of nucleotides at the targeted site, and off-target mutations. There remains a need for efficient and safe methods of genetically engineering immune cells.

### SUMMARY

[0004] The present disclosure provides systems and compositions for epigenetic modification (“epigenetic editors” or “epigenetic editing systems” herein), and methods of using the same to generate epigenetic modification at B2M, including in host cells and organisms.

[0005] In some aspects, the present disclosure provides a system for repressing transcription of a human B2M gene in a human cell, optionally a human T lymphocyte or a human NK cell, comprising
[0006] a) one or more fusion proteins that collectively comprise
   [0007] a DNA methyltransferase (DNMT) domain and/or a domain that recruits a DNMT, optionally wherein the DNMT domain and/or the recruiter domain comprise a DNMT3A domain and/or a DNMT3L domain, and optionally wherein the recruited DNMT is DNMT3A, and
   [0008] a transcriptional repressor domain,
[0009] each domain being linked to a DNA-binding domain that binds to a target region in the human B2M gene, wherein the target region comprises one or more sequences selected from SEQ ID NOs: 700-740, 744, 747-749, 752, 753, 757, 758, 760-806, 812-822, 825, 827, 830, 833, 834, 839-841, 843-845, 849, 851-853, 855, 864, 866-877, 879-883, 891-896, 898-900, 903-914, 922, 923, 925-927, 934, 936, 943-947, 949, 951-962, 975-981, 983, 985, 987-989, 995, 997-999, 1003-1005, and 1007-1011; or
[0010] b) one or more nucleic acid molecules encoding the one or more fusion proteins, optionally wherein the system does not generate a DNA break in the B2M gene.
   In some embodiments, the DNA-binding domain comprises a dead CRISPR Cas (dCas) domain, a ZFP domain, or a TALE domain. For example, the DNA-binding domain may comprise a dCas9 domain, and the system may further comprise (i) one or more guide RNAs (e.g., comprising any one of SEQ ID NOs: 1015, 1018-1020, 1023, 1024, 1028, 1029, 1031-1077, 1083-1093, 1096, 1098, 1101, 1104, 1105, 1110-1112, 1114-1116, 1120, 1122-1124, 1126, 1135, 1137-1148, 1150-1154, 1162-1167, 1169-1171, 1174-1185, 1193, 1194, 1196-1198, 1205, 1207, 1214-1218, 1220, 1222-1233, 1246-1252, 1254, 1256, 1258-1260, 1266, 1268-1270, 1274-1276, and 1278-1282), or (ii) nucleic acid molecules coding for the one or more guide RNAs.

[0011] In some embodiments, the DNA-binding domain comprises a dCas9 domain and the system further comprises (i) two guide RNAs comprising any two of SEQ ID NOs: 1015, 1018-1020, 1023, 1024, 1028, 1029, 1031-1077, 1083-1093, 1096, 1098, 1101, 1104, 1105, 1110-1112, 1114-1116, 1120, 1122-1124, 1126, 1135, 1137-1148, 1150-1154, 1162-1167, 1169-1171, 1174-1185, 1193, 1194, 1196-1198, 1205, 1207, 1214-1218, 1220, 1222-1233, 1246-1252, 1254, 1256, 1258-1260, 1266, 1268-1270, 1274-1276, and 1278-1282, or (ii) nucleic acid molecules coding for the two guide RNAs.

[0012] In some embodiments, the DNA-binding domain comprises a dCas9 domain and the system further comprises (i) three guide RNAs comprising any three of SEQ ID NOs: 1015, 1018-1020, 1023, 1024, 1028, 1029, 1031-1077, 1083-1093, 1096, 1098, 1101, 1104, 1105, 1110-1112, 1114-1116, 1120, 1122-1124, 1126, 1135, 1137-1148, 1150-1154, 1162-1167, 1169-1171, 1174-1185, 1193, 1194, 1196-1198, 1205, 1207, 1214-1218, 1220, 1222-1233, 1246-1252, 1254, 1256, 1258-1260, 1266, 1268-1270, 1274-1276, and 1278-1282, or (ii) nucleic acid molecules coding for the three guide RNAs.

[0013] In some aspects, the present disclosure provides a system for repressing transcription of a human B2M gene in a human cell, optionally a human T lymphocyte or a human NK cell, comprising
[0014] a) a fusion protein that comprises
   [0015] a DNMT3A domain,
   [0016] a DNMT3L domain,
   [0017] a DNA-binding domain, and
   [0018] a transcriptional repressor domain, or
[0019] b) a nucleic acid molecule encoding the fusion protein,
[0020] optionally wherein the system does not generate a DNA break in the B2M gene.
   In some embodiments, the DNA-binding domain comprises a dead CRISPR Cas (dCas) domain, a ZFP domain, or a TALE domain. For example, the DNA-binding domain may comprise a dCas9 domain, and the system may further comprise (i) one or more guide RNAs (e.g., comprising any one of SEQ ID NOs: 1012-1282), or (ii) nucleic acid molecules coding for the one or more guide RNAs.

[0021] In certain embodiments, the dCas domain comprises a dCas9 sequence, such as a sequence with at least 90% identity to SEQ ID NO: 12 or 13.

[0022] In some embodiments, the DNA-binding domain binds to a target sequence in SEQ ID NO: 1283 or 1284.

[0023] In some embodiments, the DNA-binding domain comprises a ZFP domain that targets a nucleotide sequence selected from SEQ ID NOs: 700-740.

[0024] In some embodiments, the DNMT3A domain comprises a sequence with at least 90% identity to SEQ ID NO: 574 or 575.

[0025] The DNMT3L domain may comprise, e.g., a sequence with at least 90% identity to a sequence selected from SEQ ID NOs: 578-581. In some embodiments, the DNMT3L domain comprises a sequence with at least 90% identity to a sequence selected from SEQ ID NOs: 582-603. In some embodiments, the DNMT3L domain comprises a sequence with at least 90% identity to a sequence selected from SEQ ID NOs: 601-603.

[0026] In some embodiments, the transcriptional repressor domain comprises a sequence with at least 90% identity to a sequence selected from SEQ ID NOs: 33-570. In certain embodiments, the transcriptional repressor domain is a KRAB domain derived from KOX1, ZIM3, ZFP28, or ZN627. The KRAB domain may comprise, e.g., a sequence with at least 90% identity to a sequence selected from SEQ ID NOs: 89, 116, 245, and 255. In some embodiments, the transcriptional repressor domain comprises a fusion of the N- and C-terminal regions of ZIM3 and KOX1 KRAB, and optionally comprises the amino acid sequence of SEQ ID NO: 571 or 572. In certain embodiments, the transcriptional repressor domain is derived from KAP1, MECP2, HP1a/CBX5, HP1b, CBX8, CDYL2, TOX, TOX3, TOX4, EED, EZH2, RBBP4, RCOR1, or SCML2.

[0027] In some embodiments, the system comprises
[0028] a) a fusion protein comprising the DNMT3A domain, the DNMT3L domain, the transcriptional repressor domain, and the DNA-binding domain,
   [0029] optionally wherein one or both of the DNMT3A domain and the DNMT3L domain are human, and
   [0030] optionally wherein the DNA-binding domain is a dead CRISPR Cas domain or a ZFP domain; or
[0031] b) a nucleic acid molecule encoding the fusion protein.

[0032] In certain embodiments, the fusion protein comprises, from N-terminus to C-terminus, the DNMT3A domain, a first peptide linker, the DNMT3L domain, a second peptide linker, the DNA-binding domain, a third peptide linker, and the transcriptional repressor domain. For example, the fusion protein may comprise, from N-terminus to C-terminus, the DNMT3A domain, the first peptide linker, the DNMT3L domain, the second peptide linker, a first nuclear localization signal (NLS), the DNA-binding domain, a second NLS, the third peptide linker, and the transcriptional repressor domain. The fusion protein may comprise, from N-terminus to C-terminus, a first NLS, the DNMT3A domain, the first peptide linker, the DNMT3L domain, the second peptide linker, the DNA-binding domain, the third peptide linker, the transcriptional repressor domain, and a second NLS. The fusion protein may comprise, from N-terminus to C-terminus, first and second NLSs, the DNMT3A domain, the first peptide linker, the DNMT3L domain, the second peptide linker, the DNA-binding domain, the third peptide linker, the transcriptional repressor domain, and third and fourth NLSs. In particular embodiments, the transcriptional repressor domain is a KRAB domain, such as a human KOX1, ZFP28, ZN627, or ZIM3 KRAB domain. In particular embodiments, one or both of the second and third peptide linkers are XTEN linkers, which may be selected from XTEN80 (e.g., SEQ ID NO: 643) and XTEN16 (e.g., SEQ ID NO: 638), e.g., wherein the second peptide linker is XTEN80, and the third peptide linker is XTEN16.

[0033] In some embodiments, the fusion protein may comprise, from N-terminus to C-terminus, a human DNMT3A domain, a first peptide linker, a human DNMT3L domain, an XTEN80 peptide linker, a first NLS, a dSpCas9 domain, a second NLS, an XTEN16 peptide linker, and a human KOX1 KRAB domain. In certain embodiments, the fusion protein comprises SEQ ID NO: 658 or a sequence at least 90% identical thereto.

[0034] In some embodiments, the fusion protein comprises, from N-terminus to C-terminus, a human DNMT3A domain, a first peptide linker, a human DNMT3L domain, an XTEN80 peptide linker, a first NLS, a ZFP domain, a second NLS, an XTEN16 linker, and a human KOX1 KRAB domain. In certain embodiments, the fusion protein comprises SEQ ID NO: 659 or a sequence at least 90% identical thereto.

[0035] In some embodiments, the fusion protein comprises, from N-terminus to C-terminus, first and second NLSs, a human DNMT3A domain, a first peptide linker, a human DNMT3L domain, an XTEN80 peptide linker, a dSpCas9 domain, an XTEN16 peptide linker, a human KOX1 KRAB domain, and third and fourth NLSs. In particular embodiments, the fusion protein may comprise the amino acid sequence of SEQ ID NO: 660 or a sequence at least 90% identical thereto.

[0036] In some embodiments, the fusion protein comprises, from N-terminus to C-terminus, first and second NLSs, a human DNMT3A domain, a first peptide linker, a human DNMT3L domain, an XTEN80 peptide linker, a ZFP domain, an XTEN16 peptide linker, a human KOX1 KRAB domain, and third and fourth NLSs.

[0037] In some embodiments, the fusion protein comprises, from N-terminus to C-terminus, first and second NLSs, a human DNMT3A domain, a first peptide linker, a human DNMT3L domain, an XTEN80 peptide linker, a dSpCas9 domain, an XTEN16 peptide linker, a human ZFP28 KRAB domain, and third and fourth NLSs. In particular embodiments, the fusion protein may comprise the amino acid sequence of SEQ ID NO: 661 or a sequence at least 90% identical thereto.

[0038] In some embodiments, the fusion protein comprises, from N-terminus to C-terminus, first and second NLSs, a human DNMT3A domain, a first peptide linker, a human DNMT3L domain, an XTEN80 peptide linker, a ZFP domain, an XTEN16 peptide linker, a human ZFP28 KRAB domain, and third and fourth NLSs.

[0039] In some embodiments, the fusion protein comprises, from N-terminus to C-terminus, first and second NLSs, a human DNMT3A domain, a first peptide linker, a human DNMT3L domain, an XTEN80 peptide linker, a dSpCas9 domain, an XTEN16 peptide linker, a human ZN627 KRAB domain, and third and fourth NLSs. In particular embodiments, the fusion protein may comprise the amino acid sequence of SEQ ID NO: 662 or a sequence at least 90% identical thereto.

[0040] In some embodiments, the fusion protein comprises, from N-terminus to C-terminus, first and second NLSs, a human DNMT3A domain, a first peptide linker, a human DNMT3L domain, an XTEN80 peptide linker, a ZFP domain, an XTEN16 peptide linker, a human ZN627 KRAB domain, and third and fourth NLSs.

[0041] In some embodiments, the fusion protein comprises, from N-terminus to C-terminus, first and second NLSs, a human DNMT3A domain, a first peptide linker, a human DNMT3L domain, an XTEN80 peptide linker, a dSpCas9 domain, an XTEN16 peptide linker, a human ZIM3 KRAB domain, and third and fourth NLSs. In particular embodiments, the fusion protein may comprise the amino acid sequence of SEQ ID NO: 663 or a sequence at least 90% identical thereto or SEQ ID NO: 667 or a sequence at least 90% identical thereto.

[0042] In some embodiments, the fusion protein comprises, from N-terminus to C-terminus, first and second NLSs, a human DNMT3A domain, a first peptide linker, a human DNMT3L domain, an XTEN80 peptide linker, a ZFP domain, an XTEN16 peptide linker, a human ZIM3 KRAB domain, and third and fourth NLSs.

[0043] In some embodiments, at least one of the NLSs in a fusion protein described herein is an SV40 NLS (e.g., SEQ ID NO: 644).

[0044] In some embodiments, the system comprises:
[0045] a) a first fusion protein comprising a first DNA-binding domain and comprising or recruiting the DNMT3A domain,
   [0046] a second fusion protein comprising a second DNA-binding domain and comprising or recruiting the DNMT3L domain, and
   [0047] a third fusion protein comprising a third DNA-binding domain and comprising or recruiting the transcriptional repressor domain; or
[0048] b) one or more nucleic acid molecules encoding the fusion proteins.

[0049] The present disclosure also provides a human cell comprising a system described herein, or progeny of the cell. In some embodiments, the cell is a T lymphocyte or a NK cell.

[0050] The present disclosure also provides a human cell modified (optionally ex vivo) by a system described herein, or progeny of the cell. In some embodiments, the cell is a T lymphocyte or a NK cell.

[0051] The present disclosure also provides a pharmaceutical composition comprising a system described herein and a pharmaceutically acceptable excipient. In some embodiments, the composition comprises lipid nanoparticles (LNPs) comprising the system, and/or the DNA-binding domain is a dCas domain and the LNPs further comprise one or more gRNAs.

[0052] The present disclosure also provides a pharmaceutical composition comprising human cells as described herein and a pharmaceutically acceptable excipient.

[0053] The present disclosure also provides a method of treating a patient in need thereof, comprising administering a system, human cells, or a pharmaceutical composition described herein to the patient (e.g., intravenously). In some embodiments, the patient has cancer or autoimmune disease.

[0054] The present disclosure also provides a system, human cells, or a pharmaceutical composition described herein for use in treating a patient in need thereof, e.g., in a method described herein.

[0055] The present disclosure also provides use of a system or human cells described herein in the manufacture of a medicament for treating a patient in need thereof, e.g., in a method described herein.

[0056] The present disclosure also provides articles and kits comprising the systems or human cells described herein.

[0057] Other features, objectives, and advantages of the invention are apparent in the detailed description that follows. It should be understood, however, that the detailed description, while indicating embodiments and embodiments of the invention, is given by way of illustration only, not limitation. Various changes and modifications within the scope of the invention will become apparent to those skilled in the art from the detailed description.

### BRIEF DESCRIPTION OF THE DRAWINGS

[0058] FIG. 1 is a scatter plot showing the relative B2M expression (y-axis) in cells treated with a CRISPR-off epigenetic editing system (DNMT3A-DNMT3L-dCas9-KRAB). The distance of the gRNA target site to the B2M transcription start site (TSS) is shown on the x-axis. Top performing guides from the screen were selected (designated by “Yes”). Empty color dots: not selected. Empty triangle shapes: wildtype Cas9. Dark color dots: yes selected.

[0059] FIG. 2A-2C show flow cytometry graphs of DON008 with no gRNA (FIG. 2A) and a flow cytometry graph of DON008 with RNA102 and RNA964 (FIG. 2B). FIGS. 2A and 2B show the gating strategy for the flow cytometry work flow. FIG. 2C shows B2M multiplex screen shows 27 RNA guide pairs with significant B2M silencing.

[0060] FIG. 3A-3B show heat maps indicating the day 6 results. The outer edge reports the distance between the gRNA-binding sequence and the B2M TSS. The inner heat map reports the percentage of B2M+ cells observed after treatment with the relevant gRNAs.

[0061] FIG. 4 shows B2M silencing with guide RNA pairs and single guides in human T cells over time. As shown in the figure, the top silencing pairs from day 6 remained silenced at day 20.

[0062] FIG. 5A-5B show exon level differences of B2M expression between WTCas9 and CRISPR-Off. Results indicate that CRISPR-Off reduces B2M isoform/exon expression more robustly than WTCas9.

[0063] FIG. 6A-6B show hybrid capture methylation analysis of B2M duplex CRISPR-Off. FIG. 6A summarizes the conditions tested and FIG. 6B shows methylation observed upstream of the B2M locus.

[0064] FIG. 7A-7B show robust B2M CpG methylation in sorted B2M-negative populations.

[0065] FIG. 8 shows B2M CpG methylation achieved with RNA138/949 duplex in comparison with no gRNA and RNA104/988.

[0066] FIG. 9A-9B show a comparison of B2M levels with multiple effectors as assayed in fresh cells.

[0067] FIG. 10A-10C show a comparison of B2M levels with multiple effectors as assayed in frozen cells.

[0068] FIG. 11A-B are related to the B2M silencing efficiency in different serum conditions. FIG. 11A shows the gating strategy utilized for flow cytometry analysis the effect of 5% HuS vs 10% HuS post nucleofection on B2M silencing and the durability of B2M silencing. FIG. 11B shows a time course of B2M silencing, demonstrating that serum percentage does not make a difference in silencing efficiency.

[0069] FIG. 12A-12C show day 6 results comparing day 2 vs day 3 nucleofection silencing efficiency (FIG. 12A), the transduction efficiency of day 3 nucleofection (FIG. 12B), and the day 6 silencing results obtained from CAR+ or CAR− cells (FIG. 12C).

[0070] FIG. 13A-13B show IDT gRNA batch comparisons. FIG. 13A shows the gating strategy for testing three different batches of 2 B2M guides. FIG. 13B shows epigenetic silencing of B2M on day 7.

[0071] FIG. 14A-B show graphs reporting the results of dose-response experiments using dual B2M guides. FIG. 14A shows the dose response of B2M silencing at day 6 post-nucleofection, and FIG. 14B shows the dose response of B2M silencing at day 13 post-nucleofection.

[0072] FIG. 15A-15B show the response of allogeneic healthy donor CD8+ T cells to mock-modified or B2M-silenced or B2M multi-target T cells as observed using a mixed lymphocyte co-culture assay.

[0073] FIG. 16A-C shows B2M silencing with guide pairs and triplets.

### DETAILED DESCRIPTION

[0074] The present disclosure provides epigenetic editors for repressing expression of the human B2M gene. By altering expression of B2M, the editors herein may be used to generate allogeneic cells (e.g., T cells, NK cells, etc.) with reduced alloreactivity. Unless otherwise stated, “B2M” (in italic) refers herein to a human B2M gene. A human B2M gene sequence can be found at Ensembl Accession No. ENSG00000166710. The present epigenetic editors have several advantages compared to other genome engineering methods, including reversibility, decreased risk of chromosomal translocation, and durable, inheritable silencing.

[0075] In some embodiments, the region of the human B2M gene targeted for epigenetic regulation is about 2 kb long, and is approximately +/−1 kb of the B2M TSS. In certain embodiments, the region has the nucleotide sequence of SEQ ID NO: 1284 (shown below). In some embodiments, the targeted B2M region is about 1 kb long, and is approximately +/−500 bps of the B2M TSS. In certain embodiments, the region targeted has the nucleotide sequence of SEQ ID NO: 1283 (shown below). The B2M TSS is at #chr15:55039548 of Genome GRCh38.

(SEQ ID NO: 1283)
TACCCAGAGAATGGAGAAACCCTGCAGGGAATTCCCAAGCTGTAGTTATAAACAGAAGTT
CTCCTTCTGCTAGGTAGCATTCAAAGATCTTAATCTTCTGGGTTTCCGTTTTCTCGAATG
AAAAATGCAGGTCCGAGCAGTTAACTGGCTGGGGCACCATTAGCAAGTCACTTAGCATCT
CTGGGGCCAGTCTGCAAAGCGAGGGGGCAGCCTTAATGTGCCTCCAGCCTGAAGTCCTAG
AATGAGCGCCCGGTGTCCCAAGCTGGGGCGCGCACCCCAGATCGGAGGGCGCCGATGTAC
AGACAGCAAACTCACCCAGTCTAGTGCATGCCTTCTTAAACATCACGAGACTCTAAGAAA
AGGAAACTGAAAACGGGAAAGTCCCTCTCTCTAACCTGGCACTGCGTCGCTGGCTTGGAG
ACAGGTGACGGTCCCTGCGGGCCTTGTCCTGATTGGCTGGGCACGCGTTTAATATAAGTG
GAGGCGTCGCGCTGGCGGGCATTCCTGAAGCTGACAGCATTCGGGCCGAGATGTCTCGCT
CCGTGGCCTTAGCTGTGCTCGCGCTACTCTCTCTTTCTGGCCTGGAGGCTATCCAGCGTG
AGTCTCTCCTACCCTCCCGCTCTGGTCCTTCCTCTCCCGCTCTGCACCCTCTGTGGCCCT
CGCTGTGCTCTCTCGCTCCGTGACTTCCCTTCTCCAAGTTCTCCTTGGTGGCCCGCCGTG
GGGCTAGTCCAGGGCTGGATCTCGGGGAAGCGGCGGGGTGGCCTGGGAGTGGGGAAGGGG
GTGCGCACCCGGGACGCGCGCTACTTGCCCCTTTCGGCGGGGAGCAGGGGAGACCTTTGG
CCTACGGCGACGGGAGGGTCGGGACAAAGTTTAGGGCGTCGATAAGCGTCAGAGCGCCGA
GGTTGGGGGGGGTTTCTCTTCCGCTCTTTCGCGGGGCCTCTGGCTCCCCCAGCGCAGCT
GGAGTGGGGGACGGGTAGGCTCGTCCCAAAGGCGCGGCGCT
(SEQ ID NO: 1284)
GAGCCCTTTGTCTTCCAGTGTCTAAAATATTAATGTCAATGGAATCAGGCCAGAGTTTGA
ATTCTAGTCTCTTAGCCTTTGTTTCCCCTGTCCATAAAATGAATGGGGGTAATTCTTTCC
TCCTACAGTTTATTTATATATTCACTAATTCATTCATTCATCCATCCATTCGTTCATTCG
GTTTACTGAGTACCTACTATGTGCCAGCCCCTGTTCTAGGGTGGAAACTAAGAGAATGAT
GTACCTAGAGGGCGCTGGAAGCTCTAAAGCCCTAGCAGTTACTGCTTTTACTATTAGTGG
TCGTTTTTTTCTCCCCCCCGCCCCCCGACAAATCAACAGAACAAAGAAAATTACCTAAAC
AGCAAGGACATAGGGAGGAACTTCTTGGCACAGAACTTTCCAAACACTTTTTCCTGAAGG
GATACAAGAAGCAAGAAAGGTACTCTTTCACTAGGACCTTCTCTGAGCTGTCCTCAGGAT
GCTTTTGGGACTATTTTTCTTACCCAGAGAATGGAGAAACCCTGCAGGGAATTCCCAAGC
TGTAGTTATAAACAGAAGTTCTCCTTCTGCTAGGTAGCATTCAAAGATCTTAATCTTCTG
GGTTTCCGTTTTCTCGAATGAAAAATGCAGGTCCGAGCAGTTAACTGGCTGGGGCACCAT
TAGCAAGTCACTTAGCATCTCTGGGGCCAGTCTGCAAAGCGAGGGGGCAGCCTTAATGTG
CCTCCAGCCTGAAGTCCTAGAATGAGCGCCCGGTGTCCCAAGCTGGGGCGCGCACCCCAG
ATCGGAGGGCGCCGATGTACAGACAGCAAACTCACCCAGTCTAGTGCATGCCTTCTTAAA
CATCACGAGACTCTAAGAAAAGGAAACTGAAAACGGGAAAGTCCCTCTCTCTAACCTGGC
ACTGCGTCGCTGGCTTGGAGACAGGTGACGGTCCCTGCGGGCCTTGTCCTGATTGGCTGG
GCACGCGTTTAATATAAGTGGAGGCGTCGCGCTGGCGGGCATTCCTGAAGCTGACAGCAT
TCGGGCCGAGATGTCTCGCTCCGTGGCCTTAGCTGTGCTCGCGCTACTCTCTCTTTCTGG
CCTGGAGGCTATCCAGCGTGAGTCTCTCCTACCCTCCCGCTCTGGTCCTTCCTCTCCCGC
TCTGCACCCTCTGTGGCCCTCGCTGTGCTCTCTCGCTCCGTGACTTCCCTTCTCCAAGTT
CTCCTTGGTGGCCCGCCGTGGGGCTAGTCCAGGGCTGGATCTCGGGGAAGCGGCGGGGTG
GCCTGGGAGTGGGGAAGGGGGTGCGCACCCGGGACGCGCGCTACTTGCCCCTTTCGGCGG
GGAGCAGGGGAGACCTTTGGCCTACGGCGACGGGAGGGTCGGGACAAAGTTTAGGGCGTC
GATAAGCGTCAGAGCGCCGAGGTTGGGGGAGGGTTTCTCTTCCGCTCTTTCGCGGGGCCT
CTGGCTCCCCCAGCGCAGCTGGAGTGGGGGACGGGTAGGCTCGTCCCAAAGGCGCGGCGC
TGAGGTTTGTGAACGCGTGGAGGGGCGCTTGGGGTCTGGGGGAGGCGTCGCCCGGGTAAG
CCTGTCTGCTGCGGCTCTGCTTCCCTTAGACTGGAGAGCTGTGGACTTCGTCTAGGCGCC
CGCTAAGTTCGCATGTCCTAGCACCTCTGGGTCTATGTGGGGCCACACCGTGGGGAGGAA
ACAGCACGCGACGTTTGTAGAATGCTTGGCTGTGATACAAAGCGGTTTCGAATAATTAAC
TTATTTGTTCCCATCACATGTCACTTTTAAAAAATTATAAGAACTACCCGTTATTGACAT
CTTTCTGTGTGCCAAGGACTTTATGTGCTTTGCGTCATTTAATTTTGAAAACAGTTATCT
TCCGCCATAGATAACTACTATGGTTATCTTCTGCCTCTCACAGATGAAGAAACTAAGGCA
CCGAGATTTTAAGAAACTTAATTACACAGGGGATAAATGGCAGCAATCGAGATTGAAGTC
AAGCCTAACCAGGGCTTTTGC

[0076] In some embodiments, the targeted site may be 10 to 50 bps (e.g., 10 to 40, 10 to 30, 10 to 20, 15 to 30, 15 to 25, or 15 to 20 bps) in length. In some embodiments, the targeted strand in the targeted region is the sense strand of the gene. In other embodiments, the targeted strand in the targeted region is the antisense strand of the gene.

[0077] In some embodiments, an epigenetic editor as described herein may comprise one or more fusion proteins, wherein each fusion protein comprises a DNA-binding domain linked to one or more effector domains for epigenetic modification. In certain embodiments, where the DNA-binding domain is a polynucleotide guided DNA-binding domain, the epigenetic editor may further comprise one or more guide polynucleotides. DNA-binding domains, effector domains, and guide polynucleotides of an epigenetic editor as described herein may be selected, e.g., from those described below, in any functional combination.

[0078] The epigenetic editors described herein may be expressed in a host cell transiently, or may be integrated in a genome of the host cell; such cells and their progeny are also contemplated by the present disclosure. Both transiently expressed and integrated epigenetic editors or components thereof can effect stable epigenetic modifications. For example, after introducing to a host cell an epigenetic editor described herein, the target gene in the host cell may be stably or permanently repressed or silenced. In some embodiments, expression of the target gene is reduced or silenced for at least 1 week, at least 2 weeks, at least 3 weeks, at least 4 weeks, at least 5 weeks, at least 6 weeks, at least 7 weeks, at least 2 months, at least 3 months, at least 4 months, at least 5 months, at least 6 months, at least 1 year, at least 2 years, or for the entire lifetime of the cell or the subject carrying the cell, as compared to the level of expression in the absence of the epigenetic editor. The epigenetic modification may be inherited by the progeny of the host cells into which the epigenetic editor was introduced.

### I. DNA-Binding Domains

[0079] An epigenetic editor described herein may comprise one or more DNA-binding domains that direct the effector domain(s) of the epigenetic editor to target sequences within or close to the B2M gene locus. A DNA-binding domain as described herein may be, e.g., a polynucleotide guided DNA-binding domain, a zinc finger protein (ZFP) domain, a transcription activator like effector (TALE) domain, a meganuclease DNA-binding domain, and the like. Examples of DNA-binding domains can be found in U.S. Pat. No. 11,162,114, which is incorporated by refence herein in its entirety.

[0080] In some embodiments, a DNA-binding domain described herein is encoded by its native coding sequence. In other embodiments, the DNA-binding domain is encoded by a nucleotide sequence that has been codon-optimized for optimal expression in human cells.

### A. Polynucleotide Guided DNA-Binding Domains

[0081] In some embodiments, a DNA-binding domain herein may be a protein domain directed by a guide nucleic acid sequence (e.g., a guide RNA sequence) to a target site in the B2M gene locus. In certain embodiments, the protein domain may be derived from a CRISPR-associated nuclease, such as a Class I or II CRISPR-associated nuclease. In some embodiments, the protein domain may be derived from a Cas nuclease such as a Type II, Type IIA, Type IIB, Type IIC, Type V, or Type VI Cas nuclease. In certain embodiments, the protein domain may be derived from a Class II Cas nuclease selected from Cas1, Cas1B, Cas2, Cas3, Cas4, Cas5, Cas6, Cas7, Cas8, Cas9, Cas10, Cas14a, Cas14b, Cas14c, CasX, CasY, CasPhi, C2c4, C2c8, C2c9, C2c10, Csy1, Csy2, Csy3, Cse1, Cse2, Csc1, Csc2, Csa5, Csn2, Csm2, Csm3, Csm4, Csm5, Csm6, Cmr1, Cmr3, Cmr4, Cmr5, Cmr6, Csb1, Csb2, Csb3, Csx17, Csx14, Csx10, Csx16, CsaX, Csx3, Csx1, Csx1S, Csf1, Csf2, CsO, Csf4, and homologues and modified versions thereof. “Derived from” is used to mean that the protein domain comprises the full polypeptide sequence of the parent protein, or comprises a variant thereof (e.g., with amino acid residue deletions, insertions, and/or substitutions). The variant retains the desired function of the parent protein (e.g., the ability to form a complex with the guide nucleic acid sequence and the target DNA).

[0082] In some embodiments, the CRISPR-associated protein domain may be a Cas9 domain described herein. Cas9 may, for example, refer to a polypeptide with at least about 85%, 90%, 91%, 92%, 93%, 94%, 95%, 96%, 97%, 98%, 99%, or 100% sequence identity and/or sequence similarity to a wildtype Cas9 polypeptide described herein. In some embodiments, said wildtype polypeptide is Cas9 from Streptococcus pyogenes (NCBI Ref. No. NC_002737.2 (SEQ ID NO: 1)) and/or UniProt Ref. No. Q99ZW2 (SEQ ID NO: 2). In some embodiments, said wildtype polypeptide is Cas9 from Staphylococcus aureus (SEQ ID NO: 3). In some embodiments, the CRISPR-associated protein domain is a Cpf1 domain or protein, or a polypeptide with at least about 85%, 90%, 91%, 92%, 93%, 94%, 95%, 96%, 97%, 98%, 99%, or 100% sequence identity and/or sequence similarity to a wildtype Cpf1 polypeptide described herein (e.g., Cpf1 from Francisella novicida (UniProt Ref. No. U2UMQ6 or SEQ ID NO: 4). In certain embodiments, the CRISPR-associated protein domain may be a modified form of the wildtype protein comprising one or more amino acid residue changes such as a deletion, an insertion, or a substitution; a fusion or chimera; or any combination thereof.

[0083] Cas9 sequences and structures of variant Cas9 orthologs have been described for various organisms. Exemplary organisms from which a Cas9 domain herein can be derived include, but are not limited to, Streptococcus pyogenes, Streptococcus thermophilus, Streptococcus sp., Staphylococcus aureus, Listeria innocua, Lactobacillus gasseri, Francisella novicida, Wolinella succinogenes, Sutterella wadsworthensis, Gamma proteobacterium, Neisseria meningitidis, Campylobacter jejuni, Pasteurella multocida, Fibrobacter succinogene, Rhodospirillum rubrum, Nocardiopsis dassonvillei, Streptomyces pristinaespiralis, Streptomyces viridochromogenes, Streptosporangium roseum, Alicyclobacillus acidocaldarius, Bacillus pseudomycoides, Bacillus selenitireducens, Exiguobacterium sibiricum, Lactobacillus delbrueckii, Lactobacillus salivarius, Lactobacillus buchneri, Treponema denticola, Microscilla marina, Burkholderiales bacterium, Polaromonas naphthalenivorans, Polaromonas sp., Crocosphaera watsonii, Cyanothece sp., Microcystis aeruginosa, Synechococcus sp., Acetohalobium arabaticum, Ammonifex degensii, Caldicellulosiruptor bescii, Candidatus Desulforudis, Clostridium botulinum, Clostridium difficile, Finegoldia magna, Natranaerobius thermophilus, Pelotomaculum thermopropionicum, Acidithiobacillus caldus, Acidithiobacillus ferrooxidans, Allochromatium vinosum, Marinobacter sp., Nitrosococcus halophilus, Nitrosococcus watsoni, Pseudoalteromonas haloplanktis, Ktedonobacter racemifer, Methanohalobium evestigatum, Anabaena variabilis, Nodularia spumigena, Nostoc sp., Arthrospira maxima, Arthrospira platensis, Arthrospira sp., Lyngbya sp., Microcoleus chthonoplastes, Oscillator ia sp., Petrotoga mobilis, Thermosipho africanus, Streptococcus pasteurianus, Neisseria cinerea, Campylobacter lari, Parvibaculum lavamentivorans, Coryne bacterium diphtheria, and Acaryochloris marina. Cas9 sequences also include those from the organisms and loci disclosed in Chylinski et al., RNA Biol. (2013) 10 (5): 726-37.

[0084] In some embodiments, the Cas9 domain is from Streptococcus pyogenes (spCas9). In some embodiments, the Cas9 domain is from Staphylococcus aureus (saCas9).

[0085] Other Cas domains are also contemplated for use in the epigenetic editors herein. These include, for example, those from CasX (Cas12E) (e.g., SEQ ID NO: 5), CasY (Cas12d) (e.g., SEQ ID NO: 6), Casφ (CasPhi) (e.g., SEQ ID NO: 7), Cas12f1 (Cas14a) (e.g., SEQ ID NO: 8), Cas12f2 (Cas14b) (e.g., SEQ ID NO: 9), Cas12f3 (Cas14c) (e.g., SEQ ID NO: 10), and C2c8 (e.g., SEQ ID NO: 11).

[0086] For epigenetic editing, the nuclease-derived protein domain (e.g., a Cas9 or Cpf1 domain) may have reduced or no nuclease activity through mutations such that the protein domain does not cleave DNA or has reduced DNA-cleaving activity while retaining the ability to complex with the guide nucleic acid sequence (e.g., guide RNA) and the target DNA. For example, the nuclease activity may be reduced by at least 30%, 35%, 40%, 45%, 50%, 55%, 60%, 65%, 70%, 75%, 80%, 85%, 90%, 95%, or 99% compared to the wildtype domain. In some embodiments, a CRISPR-associated protein domain described herein is catalytically inactive (“dead”). Examples of such domains include, for example, dCas9 (“dead” Cas9), dCpf1, ddCpf1, dCasPhi, ddCas12a, dLbCpf1, and dFnCpf1. A dCas9 protein domain, for example, may comprise one, two, or more mutations as compared to wildtype Cas9 that abrogate its nuclease activity. The DNA cleavage domain of Cas9 is known to include two subdomains: the HNH nuclease subdomain and the RuvC1 subdomain. The HNH subdomain cleaves the strand complementary to the gRNA, whereas the RuvC1 subdomain cleaves the non-complementary strand. Mutations within these subdomains can silence the nuclease activity of Cas9. For example, the mutations D10A (in RuvC1) and H840A (in HNH) completely inactivate the nuclease activity of SpCas9. SaCas9, similarly, may be inactivated by the mutations D10A and N580A. In some embodiments, the dCas9 comprises at least one mutation in the HNH subdomain and/or the RuvC1 subdomain that reduces or abrogates nuclease activity. In some embodiments, the dCas9 only comprises a RuvC1 subdomain, or only comprises an HNH subdomain. It is to be understood that any mutation that inactivates the RuvC1 and/or the HNH domain may be included in a dCas9 herein, e.g., insertion, deletion, or single or multiple amino acid substitution in the RuvC1 domain and/or the HNH domain.

[0087] In some embodiments, a dCas9 protein herein comprises a mutation at position(s) corresponding to position D10 (e.g., D10A), H840 (e.g., H840A), or both, of a wildtype SpCas9 sequence as numbered in the sequence provided at UniProt Accession No. Q99ZW2 (SEQ ID NO: 2). In particular embodiments, the dCas9 comprises the amino acid sequence of dSpCas9 (D10A and H840A) (SEQ ID NO: 12).

[0088] In some embodiments, a dCas9 protein as described herein comprises a mutation at position(s) corresponding to position D10 (e.g., D10A), N580 (e.g., N580A), or both, of a wildtype SaCas9 sequence (e.g., SEQ ID NO: 3). In particular embodiments, the dCas9 comprises the amino acid sequence of dSaCas9 (D10A and N580A) (SEQ ID NO: 13).

[0089] Additional suitable mutations that inactivate Cas9 will be apparent to those of skill in the art based on this disclosure and knowledge in the field and are within the scope of this disclosure. Such mutations may include, but are not limited to, D839A, N863A, and/or K603R in SpCas9. The present disclosure contemplates any mutations that reduce or abrogate the nuclease activity of any Cas9 described herein (e.g., mutations corresponding to any of the Cas9 mutations described herein).

[0090] A dCpf1 protein domain may comprise one, two, or more mutations as compared to wildtype Cpf1 that reduce or abrogate its nuclease activity. The Cpf1 protein has a RuvC-like endonuclease domain that is similar to the RuvC domain of Cas9, but does not have an HNH endonuclease domain, and the N-terminal of Cpf1 does not have the alpha-helical recognition lobe of Cas9. In some embodiments, the dCpf1 comprises one or more mutations corresponding to position D917A, E1006A, or D1255A as numbered in the sequence of the Francisella novicida Cpf1 protein (FnCpf1; SEQ ID NO: 4). In certain embodiments, the dCpf1 protein comprises mutations corresponding to D917A, E1006A, D1255A, D917A/E1006A, D917A/D1255A, E1006A/D1255A, or D917A/E1006A/D1255A, or corresponding mutation(s) in any of the Cpf1 amino acid sequences described herein. In some embodiments, the dCpf1 comprises a D917A mutation. In particular embodiments, the dCpf1 comprises the amino acid sequence of dFnCpf1 (SEQ ID NO: 14).

[0091] Further nuclease inactive CRISPR-associated protein domains contemplated herein include those from, for example, dNmeCas9 (e.g., SEQ ID NO: 15), dCjCas9 (e.g., SEQ ID NO: 16), dSt1Cas9 (e.g., SEQ ID NO: 17), dSt3Cas9 (e.g., SEQ ID NO: 18), dLbCpf1 (e.g., SEQ ID NO: 19), dAsCpf1 (e.g., SEQ ID NO: 20), denAsCpf1 (e.g., SEQ ID NO: 21), dHFAsCpf1 (e.g., SEQ ID NO: 22), dRVRAsCpf1 (e.g., SEQ ID NO: 23), dRRAsCpf1 (e.g., SEQ ID NO: 24), dCasX (e.g., SEQ ID NO: 25), and dCasPhi (e.g., SEQ ID NO: 26).

[0092] In some embodiments, a Cas9 domain described herein may be a high fidelity Cas9 domain, e.g., comprising one or more mutations that decrease electrostatic interactions between the Cas9 domain and the sugar-phosphate backbone of DNA to confer increased target binding specificity. In certain embodiments, the high fidelity Cas9 domain may be nuclease inactive as described herein.

[0093] A CRISPR-associated protein domain described herein may recognize a protospacer adjacent motif (PAM) sequence in a target gene. A “PAM” sequence is typically a 2 to 6 bp DNA sequence immediately following the sequence targeted by the CRISPR-associated protein domain. The PAM sequence is required for CRISPR protein binding and cleavage but is not part of the target sequence. The CRISPR-associated protein domain may either recognize a naturally occurring or canonical PAM sequence or may have altered PAM specificity. CRISPR-associated protein domains that bind to non-canonical PAM sequences have been described in the art. For example, Cas9 domains that bind non-canonical PAM sequences have been described in Kleinstiver et al., Nature (2015) 523 (7561): 481-5 and Kleinstiver et al., Nat Biotechnol. (2015) 33:1293-8. Such Cas9 domains may include, for example, those from “VRER” SpCas9, “EQR” SpCas9, “VQR” SpCas9, “SpG Cas9,” “SpRYCas9,” and “KKH” SaCas9. Nuclease inactive versions of these Cas9 domains are also contemplated, such as nuclease inactive VRER SpCas9 (e.g., SEQ ID NO: 27), nuclease inactive EQR SpCas9 (e.g., SEQ ID NO: 28), nuclease inactive VQR SpCas9 (e.g., SEQ ID NO: 29), nuclease inactive SpG Cas9 (e.g., SEQ ID NO: 30), nuclease inactive SpRY Cas9 (e.g., SEQ ID NO: 31), and nuclease inactive KKH SaCas9 (e.g., SEQ ID NO: 32). Another example is the Cas9 of Francisella novicida engineered to recognize 5′-YG-3′ (where “Y” is a pyrimidine).

[0094] Additional suitable CRISPR-associated proteins, orthologs, and variants, including nuclease inactive variants and sequences, will be apparent to those of skill in the art based on this disclosure.

[0095] Guide RNAs that can be used in conjunction with the CRISPR-associated protein domains herein are further described in Section II below.

### B. Zinc Finger Protein Domains

[0096] In some embodiments, the DNA-binding domain of an epigenetic editor described herein comprises a zinc finger protein (ZFP) domain (or “ZF domain” as used herein). ZFPs are proteins having at least one zinc finger, and bind to DNA in a sequence-specific manner. A “zinc finger” (ZF) or “zinc finger motif” (ZF motif) refers to a polypeptide domain comprising a beta-beta-alpha (ββα)-protein fold stabilized by a zinc ion. A ZF binds from two to four base pairs of nucleotides, typically three or four base pairs (contiguous or noncontiguous). Each ZF typically comprises approximately 30 amino acids. ZFP domains may contain multiple ZFs that make tandem contacts with their target nucleic acid sequence. A tandem array of ZFs may be engineered to generate artificial ZFPs that bind desired nucleic acid targets. ZFPs may be rationally designed by using databases comprising triplet (or quadruplet) nucleotide sequences and individual ZF amino acid sequences, in which each triplet or quadruplet nucleotide sequence is associated with one or more amino acid sequences of ZFs that bind the particular triplet or quadruplet sequence. See, e.g., U.S. Pat. Nos. 6,453,242, 6,534,261, and 8,772,453.

[0097] ZFPs are widespread in eukaryotic cells, and may belong to, e.g., C2H2 class, CCHC class, PHD class, or RING class. An exemplary motif characterizing one class of these proteins (C2H2 class) is -Cys-(X)₂₋₄-Cys-(X)₁₂-His-(X)₃₋₅-His- (SEQ ID NO: 657), where X is any independently chosen amino acid. In some embodiments, a ZFP domain herein may comprise a ZF array comprising sequential C2H2-ZFs each contacting three or more sequential nucleotides.

[0098] A ZFP domain of an epigenetic editor described herein may include 2, 3, 4, 5, 6, 7, 8, 9, 10, 11, 12, or more ZFs. The ZFP domain may include an array of two-finger or three-finger units, e.g., 3, 4, 5, 6, 7, 8, 9 or 10 or more units, wherein each unit binds a subsite in the target sequence. In some embodiments, a ZFP domain comprising at least three ZFs recognizes a target DNA sequence of 9 or 10 nucleotides. In some embodiments, a ZFP domain comprising at least four ZFs recognizes a target DNA sequence of 12 to 14 nucleotides. In some embodiments, a ZFP domain comprising at least six ZFs recognizes a target DNA sequence of 18 to 21 nucleotides.

[0099] In some embodiments, ZFs in a ZFP domain described herein are connected via peptide linkers. The peptide linkers may be, e.g., 2, 3, 4, 5, 6, 7, 8, 9, 10, 11, 12, 13, 14, 15, 16, 17, 18, 19, 20, or more amino acids in length. In some embodiments, a linker comprises 5 or more amino acids. In some embodiments, a linker comprises 7-17 amino acids. The linker may be flexible or rigid.

[0100] In some embodiments a zinc finger array may have the sequence:

(SEQ ID NO: 650)
SRPGERPFQCRICMRNFSXXXXXXXHXXTHTGEKPFQC
RICMRNFSXXXXXXXHXXTH[linker]FQCRICMRNF
SXXXXXXXHXXTHTGEKPFQCRICMRNFSXXXXXXXHX
XTH[linker]PFQCRICMRNFSXXXXXXXHXXTHTGE
KPFQCRICMRNFSXXXXXXXHXXTHLRGS,

or a sequence at least 70%, 75%, 80%, 85%, 90%, 95%, 96%, 97%, 98%, or 99% identical thereto, where “XXXXXXX” represents the amino acids of the ZF recognition helix, which confers DNA-binding specificity upon the zinc finger; each X may be independently chosen. In the above sequence, “XX” in italics may be TR, LR or LK, and “[linker]” represents a linker sequence. In some embodiments, the linker sequence is TGSQKP (SEQ ID NO: 651); this linker may be used when sub-sites targeted by the ZFs are adjacent. In some embodiments, the linker sequence is TGGGGSQKP (SEQ ID NO: 652); this linker may be used when there is a base between the sub-sites targeted by the zinc fingers. The two indicated linkers may be the same or different. In some embodiments, the linker sequence is a minimum of 5 amino acids in length. In some embodiments, the linker sequence is a maximum of 250 amino acids in length.

[0101] ZFP domains herein may contain arrays of two or more adjacent ZFs that are directly adjacent to one another (e.g., separated by a short (canonical) linker sequence), or are separated by longer, flexible or structured polypeptide sequences. In some embodiments, directly adjacent fingers bind to contiguous nucleic acid sequences, i.e., to adjacent trinucleotides/triplets. In some embodiments, adjacent fingers cross-bind between each other's respective target triplets, which may help to strengthen or enhance the recognition of the target sequence, and leads to the binding of overlapping sequences. In some embodiments, distant ZFs within the ZFP domain may recognize (or bind to) noncontiguous nucleotide sequences.

[0102] Exemplary B2M target sequences are shown in Table 1 below.

TABLE 1
ZFP Target Sequences Within B2M

| ZF | | SEQ |
|---|---|---|
| Target | | ID |
| No. | B2M Target Site | NO |
| ZFTAR001 | GCATCTCTGGGGCCAGTC | 700 |
| ZFTAR002 | CTGGGGCCAGTCTGCAAAG | 701 |
| ZFTAR003 | GCAAAGCGAGGGGGCAGCC | 702 |
| ZFTAR004 | TCGGAGGGCGCCGATGTA | 703 |
| ZFTAR005 | GATGTTTAAGAAGGCATGC | 704 |
| ZFTAR006 | GTCTCGTGATGTTTAAGAA | 705 |
| ZFTAR007 | GGAAACTGAAAACGGGAAA | 706 |
| ZFTAR008 | GGTTAGAGAGAGGGACTTT | 707 |
| ZFTAR009 | GTGGAGGCGTCGCGCTGGC | 708 |
| ZFTAR010 | TAGGAGAGACTCACGCTGGA | 709 |
| ZFTAR011 | GAGGAAGGACCAGAGCGGGA | 710 |
| ZFTAR012 | GCGGGAGAGGAAGGACCAG | 711 |
| ZFTAR013 | GTCACGGAGCGAGAGAGCA | 712 |
| ZFTAR014 | TTGGAGAAGGGAAGTCACG | 713 |
| ZFTAR015 | GGGGAAGCGGCGGGGTGGC | 714 |
| ZFTAR016 | GGGTGCGCACCCGGGACG | 715 |
| ZFTAR017 | GCCGAAAGGGGCAAGTAGCG | 716 |
| ZFTAR018 | GTCGCCGTAGGCCAAAGG | 717 |
| ZFTAR019 | GGCGACGGGAGGGTCGGG | 718 |
| ZFTAR020 | GGCGACGGGAGGGTCGGGA | 719 |
| ZFTAR021 | TCAGAGCGCCGAGGTTGGG | 720 |
| ZFTAR022 | AGCGCCGAGGTTGGGGGA | 721 |
| ZFTAR023 | AGCGCCGAGGTTGGGGGAG | 722 |
| ZFTAR024 | GCTGGGGGAGCCAGAGGCC | 723 |
| ZFTAR025 | GCAGCTGGAGTGGGGGACG | 724 |
| ZFTAR026 | GCTGGAGTGGGGGACGGG | 725 |
| ZFTAR027 | GGAGTGGGGGACGGGTAGG | 726 |
| ZFTAR028 | GAGTGGGGGACGGGTAGG | 727 |
| ZFTAR029 | GAGTGGGGGACGGGTAGGC | 728 |
| ZFTAR030 | GTGGGGGACGGGTAGGCT | 729 |
| ZFTAR031 | GAGGTTTGTGAACGCGTGG | 730 |
| ZFTAR032 | TGTGAACGCGTGGAGGGGC | 731 |
| ZFTAR033 | GTGAACGCGTGGAGGGGC | 732 |
| ZFTAR034 | GTGAACGCGTGGAGGGGCG | 733 |
| ZFTAR035 | GTCGCCCGGGTAAGCCTGT | 734 |
| ZFTAR036 | TAAGCCTGTCTGCTGCGGCT | 735 |
| ZFTAR037 | GAACTTAGCGGGCGCCTAG | 736 |
| ZFTAR038 | GAGGTGCTAGGACATGCGAA | 737 |
| ZFTAR039 | AGTGACATGTGATGGGAAC | 738 |
| ZFTAR040 | GATTGAAGTCAAGCCTAA | 739 |
| ZFTAR041 | AGTCAAGCCTAACCAGGGC | 740 |

[0103] In some embodiments, the ZFP domain of the present epigenetic editor binds to a target sequence selected from any one of SEQ ID NOs: 700-740. The ZF may comprise the ZF framework sequence of SEQ ID NO: 650, or any other ZF framework known in the art.

### C. TALEs

[0104] In some embodiments, the DNA-binding domain of an epigenetic editor described herein comprises a transcription activator-like effector (TALE) domain. The DNA-binding domain of a TALE comprises a highly conserved sequence of about 33-34 amino acids, with a repeat variable di-residue (RVD) at positions 12 and 13 that is central to the recognition of specific nucleotides. TALEs can be engineered to bind practically any desired DNA sequence. Methods for programming TALEs are known in the art. For example, such methods are described in Carroll et al., Genet Soc Amer. (2011) 188 (4): 773-82; Miller et al., Nat Biotechnol. (2007) 25 (7): 778-85; Christian et al., Genetics (2008) 186 (2): 757-61; Li et al., Nucl Acids Res. (2010) 39 (1): 359-72; and Moscou et al., Science (2009) 326 (5959): 1501.

### D. Other DNA-Binding Domains

[0105] Other DNA-binding domains are contemplated for the epigenetic editors described herein. In some embodiments, the DNA-binding domain comprises an argonaute protein domain, e.g., from Natronobacterium gregoryi (NgAgo). NgAgo is a ssDNA-guided endonuclease that is guided to its target site by 5′ phosphorylated ssDNA (gDNA), where it produces double-strand breaks. In contrast to Cas9, the NgAgo-gDNA system does not require a protospacer-adjacent motif (PAM). Thus, using a nuclease inactive NgAgo (dNgAgo) can greatly expand the bases that may be targeted. The characterization and use of NgAgo have been described, e.g., in Gao et al., Nat Biotechnol. (2016) 34 (7): 768-73; Swarts et al., Nature (2014) 507 (7491): 258-61; and Swarts et al., Nucl Acids Res. (2015) 43 (10): 5120-9.

[0106] In some embodiments, the DNA-binding domain comprises an inactivated nuclease, for example, an inactivated meganuclease. Additional non-limiting examples of DNA-binding domains include tetracycline-controlled repressor (tetR) DNA-binding domains, leucine zippers, helix-loop-helix (HLH) domains, helix-turn-helix domains, β-sheet motifs, steroid receptor motifs, bZIP domains homeodomains, and AT-hooks.

### II. Guide Polynucleotides

[0107] Epigenetic editors described herein that comprise a polynucleotide guided DNA-binding domain may also include a guide polynucleotide that is capable of forming a complex with the DNA-binding domain. The guide polynucleotide may comprise RNA, DNA, or a mixture of both. For example, where the polynucleotide guided DNA-binding domain is a CRISPR-associated protein domain, the guide polynucleotide may be a guide RNA (gRNA). A “guide RNA” or “gRNA” refers to a nucleic acid that is able to hybridize to a target sequence and direct binding of the CRISPR-Cas complex to the target sequence. Methods of using guide polynucleotide sequences with programmable DNA-binding proteins (e.g., CRISPR-associated protein domains) for site-specific DNA targeting (e.g., to modify a genome) are known in the art.

[0108] A guide polynucleotide sequence (e.g., a gRNA sequence) may comprise two parts: 1) a nucleotide sequence comprising a “targeting sequence” that is complementary to a target nucleic acid sequence (“target sequence”), e.g., to a nucleic acid sequence comprised in a genomic target site; and 2) a nucleotide sequence that binds a polynucleotide guided DNA-binding domain (e.g., a CRISPR-Cas protein domain). The nucleotide sequence in 1) may comprise a targeting sequence that is 100% complementary to a genomic nucleic acid sequence, e.g., a nucleic acid sequence comprised in a genomic target site, and thus may hybridize to the target nucleic acid sequence. The nucleotide sequence in 1) may be referred to as, e.g., a crispr RNA, or crRNA. The nucleotide sequence in 2) may be referred to as a scaffold sequence of a guide nucleic acid, e.g., a tracrRNA, or an activating region of a guide nucleic acid, and may comprise a stem-loop structure. Parts 1) and 2) as described above may be fused to form one single guide (e.g., a single guide RNA, or sgRNA), or may be on two separate nucleic acid molecules. In some embodiments, a guide polynucleotide comprises parts 1) and 2) connected by a linker. In some embodiments, a guide polynucleotide comprises parts 1) and 2) connected by a non-nucleic acid linker, for example, a peptide linker or a chemical linker.

[0109] Part 2 (the scaffold sequence) of a guide polynucleotide as described herein may be, for example, as described in Jinek et al., Science (2012) 337:816-21; U.S. Patent Publication 2016/0208288; or U.S. Patent Publication 2016/0200779. Variants of part 2) are also contemplated by the present disclosure. For example, the tetraloop and stem loop of a gRNA scaffold (tracrRNA) sequence may be modified to include RNA aptamers, which can be bound by specific protein domains. In some embodiments, such modified gRNAs can be used to facilitate the recruitment of repressive or activating domains fused to the protein-interacting RNA aptamers.

[0110] A gRNA as provided herein typically comprises a targeting domain and a binding domain. The targeting domain (also termed “targeting sequence”) may comprise a nucleic acid sequence that binds to a target site, e.g., to a genomic nucleic acid molecule within a cell. The target site may be a double-stranded DNA sequence comprising a PAM sequence as well as the target sequence, which is located on the same strand as, and directly adjacent to, the PAM sequence. The targeting domain of the gRNA may comprise an RNA sequence that corresponds to the target sequence, i.e., it resembles the sequence of the target domain, sometimes with one or more mismatches, but typically comprising an RNA sequence instead of a DNA sequence. The targeting domain of the gRNA thus may base pair (in full or partial complementarity) with the sequence of the double-stranded target site that is complementary to the target sequence, and thus with the strand complementary to the strand that comprises the PAM sequence. It will be understood that the targeting domain of the gRNA typically does not include a sequence that resembles the PAM sequence. It will further be understood that the location of the PAM may be 5′ or 3′ of the target sequence, depending on the nuclease employed. For example, the PAM is typically 3′ of the target sequence for Cas9 nucleases, and 5′ of the target sequence for Cas12a nucleases. For an illustration of the location of the PAM and the mechanism of gRNA binding to a target site, see, e.g., FIG. 1 of Vanegas et al., Fungal Biol Biotechnol. (2019) 6:6, which is incorporated by reference herein. For additional illustration and description of the mechanism of gRNA targeting of an RNA-guided nuclease to a target site, see Fu et al., Nat Biotechnol (2014) 32 (3): 279-84 and Sternberg et al., Nature (2014) 507 (7490): 62-7, each incorporated herein by reference.

[0111] In some embodiments, the targeting domain sequence comprises between 17 and 30 nucleotides and corresponds fully to the target sequence (i.e., without any mismatch nucleotides). In some embodiments, however, the targeting domain sequence may comprise one or more, but typically not more than 4, mismatches, e.g., 1, 2, 3, or 4 mismatches. As the targeting domain is part of gRNA, which is an RNA molecule, it will typically comprise ribonucleotides, while the DNA targeting domain will comprise deoxyribonucleotides.

[0112] An exemplary illustration of a Cas9 target site, comprising a 22 nucleotide target domain, and an NGG PAM sequence, as well as of a gRNA comprising a targeting domain that fully corresponds to the target sequence (and thus base pairs with full complementarity with the DNA strand complementary to the strand comprising the target sequence and PAM) is provided below:

[target domain (DNA)][PAM]
5′-N-N-N-N-N-N-N-N-N-N-N-N-N-N-N-N-N-N-
N-N-N-N-N-G-G-3′(DNA)
3′-N-N-N-N-N-N-N-N-N-N-N-N-N-N-N-N-N-N-
N-N-N-N-N-C-C-5′(DNA)
||||||||||||||||||||||
5′-N-N-N-N-N-N-N-N-N-N-N-N-N-N-N-N-N-N-
N-N-N-N-[gRNA scaffold]-3′ (RNA)
[targeting domain (RNA)]
[ binding domain]

[0113] An exemplary illustration of a Cas 12a target site, comprising a 22 nucleotide target domain, and a TTN PAM sequence, as well as of a gRNA comprising a targeting domain that fully corresponds to the target sequence (and thus base pairs with full complementarity with the DNA strand complementary to the strand comprising the target sequence and PAM) is provided below:

[PAM][target domain (DNA)]
5′-T-T-N-N-N-N-N-N-N-N-N-N-N-N-N-N-N-N-
N-N-N-N-N-N-N-3′ (DNA)
3′-A-A-N-N-N-N-N-N-N-N-N-N-N-N-N-N-N-N-
N-N-N-N-N-N-N-5′ (DNA)
||||||||||||||||||||||
5′-[gRNA scaffold]-N-N-N-N-N-N-N-N-N-N-
N-N-N-N-N-N-N-N-N-N-N-N-3′ (RNA)
[binding domain][targeting
domain (RNA)]

[0114] While not wishing to be bound by theory, at least in some embodiments, it is believed that the length and complementarity of the targeting domain with the target sequence contributes to specificity of the interaction of the gRNA/Cas9 molecule complex with a target nucleic acid. In some embodiments, the targeting domain of a gRNA provided herein is 5 to 50 nucleotides in length. In some embodiments, the targeting domain is 15 to 25 nucleotides in length. In some embodiments, the targeting domain is 18 to 22 nucleotides in length. In some embodiments, the targeting domain is 19-21 nucleotides in length. In some embodiments, the targeting domain is 15 nucleotides in length. In some embodiments, the targeting domain is 16 nucleotides in length. In some embodiments, the targeting domain is 17 nucleotides in length. In some embodiments, the targeting domain is 18 nucleotides in length. In some embodiments, the targeting domain is 19 nucleotides in length. In some embodiments, the targeting domain is 20 nucleotides in length. In some embodiments, the targeting domain is 21 nucleotides in length. In some embodiments, the targeting domain is 22 nucleotides in length. In some embodiments, the targeting domain is 23 nucleotides in length. In some embodiments, the targeting domain is 24 nucleotides in length. In some embodiments, the targeting domain is 25 nucleotides in length. In certain embodiments, the targeting domain fully corresponds, without mismatch, to a target sequence provided herein, or a part thereof. In some embodiments, the targeting domain of a gRNA provided herein comprises 1 mismatch relative to a target sequence provided herein. In some embodiments, the targeting domain comprises 2 mismatches relative to the target sequence. In some embodiments, the target domain comprises 3 mismatches relative to the target sequence.

[0115] Methods for designing, selecting, and validating gRNAs are described herein and known in the art. Software tools can be used to optimize the gRNAs corresponding to a target DNA sequence, e.g., to minimize total off-target activity across the genome. For example, DNA sequence searching algorithms can be used to identify a target sequence in crRNAs of a gRNA for use with Cas9. Exemplary gRNA design tools include the ones described in Bae et al., Bioinformatics (2014) 30:1473-5.

[0116] Guide polynucleotides (e.g., gRNAs) described herein may be of various lengths. In some embodiments, the length of the spacer or targeting sequence depends on the CRISPR-associated protein component of the epigenetic editor system used. For example, Cas proteins from different bacterial species have varying optimal targeting sequence lengths. Accordingly, the spacer sequence may comprise, e.g., 5, 6, 7, 8, 9, 10, 11, 12, 13, 14, 15, 16, 17, 18, 19, 20, 21, 22, 23, 24, 25, 26, 27, 28, 29, 30, 31, 32, 33, 34, 35, 36, 37, 38, 39, 40, 41, 42, 43, 44, 45, 46, 47, 48, 49, 50, or more than 50 nucleotides in length. In some embodiments, the spacer comprises 10-24, 11-20, 11-16, 18-24, 19-21, or 20 nucleotides in length. In some embodiments, a guide polynucleotide (e.g., gRNA) is from 15-100 (e.g., 15, 16, 17, 18, 19, 20, 21, 22, 23, 24, 25, 26, 27, 28, 29, 30, 31, 32, 33, 34, 35, 36, 37, 38, 39, 40, 41, 42, 43, 44, 45, 46, 47, 48, 49, or 50) nucleotides in length and comprises a spacer sequence of at least 10 (e.g., 15, 16, 17, 18, 19, 20, 21, 22, 23, 24, 25, 26, 27, 28, 29, 30, 31, 32, 33, 34, 35, 36, 37, 38, 39, 40, 41, 42, 43, 44, 45, 46, 47, 48, 49, or 50) contiguous nucleotides complementary to the target sequence. In some embodiments, a guide polynucleotide described herein may be truncated, e.g., by 1, 2, 3, 4, 5, 10, 15, 20, 25, 30, 40, 50 or more nucleotides.

[0117] In certain embodiments, the 3′ end of the B2M target sequence is immediately adjacent to a PAM sequence (e.g., a canonical PAM sequence such as NGG for SpCas9). The degree of complementarity between the targeting sequence of the guide polynucleotide (e.g., the spacer sequence of a gRNA) and the target sequence may be at least 90%, 91%, 92%, 93%, 94%, 95%, 96%, 97%, 98%, 99%, or 100%. In particular embodiments, the targeting and the target sequence may be 100% complementary. In other embodiments, the targeting sequence and the target sequence may contain, e.g., 1, 2, 3, 4, 5, 6, 7, 8, 9, or 10 mismatches.

[0118] A guide polynucleotide (e.g., gRNA) may be modified with, for example, chemical alterations and synthetic modifications. A modified gRNA, for instance, can include an alteration or replacement of one or both of the non-linking phosphate oxygens and/or of one or more of the linking phosphate oxygens in the phosphodiester backbone linkage, an alteration of the ribose sugar (e.g., of the 2′ hydroxyl on the ribose sugar), an alteration of the phosphate moiety, modification or replacement of a naturally occurring nucleobase, modification or replacement of the ribose-phosphate backbone, modification of the 3′ end and/or 5′ end of the oligonucleotide, replacement of a terminal phosphate group or conjugation of a moiety, cap, or linker, or any combination thereof.

[0119] In some embodiments, one or more ribose groups of the gRNA may be modified. Examples of chemical modifications to the ribose group include, but are not limited to, 2′-O-methyl (2′-OMe), 2′-fluoro (2′-F), 2′-deoxy, 2′-O-(2-methoxyethyl) (2′-MOE), 2′-NH₂, 2′-O-allyl, 2′-O-ethylamine, 2′-O-cyanoethyl, 2′-O-acetalester, or a bicyclic nucleotide such as locked nucleic acid (LNA), 2′-(5-constrained ethyl (S-cEt)), constrained MOE, or 2′-0,4′-C-aminomethylene bridged nucleic acid (2′,4′-BNANC). 2′-O-methyl modification and/or 2′-fluoro modification may increase binding affinity and/or nuclease stability of the gRNA oligonucleotides.

[0120] In some embodiments, one or more phosphate groups of the gRNA may be chemically modified. Examples of chemical modifications to a phosphate group include, but are not limited to, a phosphorothioate (PS), phosphonoacetate (PACE), thiophosphonoacetate (thioPACE), amide, triazole, phosphonate, and phosphotriester modification. In some embodiments, a guide polynucleotide described herein may comprise one, two, three, or more PS linkages at or near the 5′ end and/or the 3′ end; the PS linkages may be contiguous or noncontiguous.

[0121] In some embodiments, the gRNA herein comprises a mixture of ribonucleotides and deoxyribonucleotides and/or one or more PS linkages.

[0122] In some embodiments, one or more nucleobases of the gRNA may be chemically modified. Examples of chemically modified nucleobases include, but are not limited to, 2-thiouridine, 4-thiouridine, N6-methyladenosine, pseudouridine, 2,6-diaminopurine, inosine, thymidine, 5-methylcytosine, 5-substituted pyrimidine, isoguanine, isocytosine, and nucleobases with halogenated aromatic groups. Chemical modifications can be made in the spacer region, the tracr RNA region, the stem loop, or any combination thereof.

[0123] Table 2 below lists exemplary gRNA target sequences for epigenetic modification of human B2M, as well as the coordinates of the start positions of the targeted site on human chromosome 15 (SEQ indicates SEQ ID NO). The Table also shows the distance from the start coordinate to the TSS coordinate of the B2M gene. Table 3 lists exemplary targeting sequences for the gRNAs.

TABLE 2
Exemplary Target Sequences of gRNAs Targeting B2M

| | Chr. | | gRNA Target Sequence | | |
|---|---|---|---|---|---|
| gRNA No. | 15 Strand | START | (DNA, 5′ to 3′) | SEQ | TSS Distance |
| gRNA001 | + | 44711283 | GGCGCGCACCCCAGATCGGA | 741 | −234 |
| gRNA002 | − | 44711369 | GAGTCTCGTGATGTTTAAGA | 742 | −148 |
| gRNA003 | + | 44711393 | GAAAGTCCCTCTCTCTAACC | 743 | −124 |
| gRNA004 | − | 44711480 | GTGCCCAGCCAATCAGGACA | 744 | −37 |
| gRNA005 | − | 44711542 | GCCCGAATGCTGTCAGCTTC | 745 | 25 |
| gRNA006 | − | 44711579 | CGCGAGCACAGCTAAGGCCA | 746 | 62 |
| gRNA007 | + | 44711582 | ACTCTCTCTTTCTGGCCTGG | 747 | 65 |
| gRNA008 | − | 44711650 | GAGGAAGGACCAGAGCGGGA | 748 | 133 |
| gRNA009 | + | 44711455 | GGGCCTTGTCCTGATTGGCT | 749 | −62 |
| gRNA010 | + | 44711478 | CACGCGTTTAATATAAGTGG | 750 | −39 |
| gRNA011 | + | 44711492 | AAGTGGAGGCGTCGCGCTGG | 751 | −25 |
| gRNA012 | + | 44711518 | TTCCTGAAGCTGACAGCATT | 752 | 1 |
| gRNA013 | + | 44711519 | TCCTGAAGCTGACAGCATTC | 753 | 2 |
| gRNA014 | − | 44711564 | GGCCACGGAGCGAGACATCT | 754 | 47 |
| gRNA015 | − | 44711585 | GAGTAGCGCGAGCACAGCTA | 755 | 68 |
| gRNA016 | − | 44711619 | ACTCACGCTGGATAGCCTCC | 756 | 102 |
| gRNA017 | − | 44711665 | GGGTGCAGAGCGGGAGAGGA | 757 | 148 |
| gRNA018 | − | 44711800 | GCACCCCCTTCCCCACTCCC | 758 | 283 |
| gRNA019 | + | 44711816 | GCTACTTGCCCCTTTCGGCG | 759 | 299 |
| gRNA020 | + | 44710718 | TGCCAGCCCCTGTTCTAGGG | 760 | −799 |
| gRNA021 | − | 44710742 | TTCCACCCTAGAACAGGGGC | 761 | −775 |
| gRNA022 | − | 44710746 | TAGTTTCCACCCTAGAACAG | 762 | −771 |
| gRNA023 | − | 44710747 | TTAGTTTCCACCCTAGAACA | 763 | −770 |
| gRNA024 | − | 44710748 | CTTAGTTTCCACCCTAGAAC | 764 | −769 |
| gRNA025 | + | 44710745 | TAAGAGAATGATGTACCTAG | 765 | −772 |
| gRNA026 | + | 44710746 | AAGAGAATGATGTACCTAGA | 766 | −771 |
| gRNA027 | + | 44710752 | ATGATGTACCTAGAGGGCGC | 767 | −765 |
| gRNA028 | − | 44710782 | TAGAGCTTCCAGCGCCCTCT | 768 | −735 |
| gRNA029 | − | 44710808 | AGTAAAAGCAGTAACTGCTA | 769 | −709 |
| gRNA030 | − | 44710809 | TAGTAAAAGCAGTAACTGCT | 770 | −708 |
| gRNA031 | − | 44710851 | TGATTTGTCGGGGGGCGGGG | 771 | −666 |
| gRNA032 | − | 44710852 | TTGATTTGTCGGGGGGCGGG | 772 | −665 |
| gRNA033 | − | 44710853 | GTTGATTTGTCGGGGGGCGG | 773 | −664 |
| gRNA034 | − | 44710854 | TGTTGATTTGTCGGGGGGCG | 774 | −663 |
| gRNA035 | − | 44710855 | CTGTTGATTTGTCGGGGGGC | 775 | −662 |
| gRNA036 | − | 44710856 | TCTGTTGATTTGTCGGGGGG | 776 | −661 |
| gRNA037 | − | 44710859 | TGTTCTGTTGATTTGTCGGG | 777 | −658 |
| gRNA038 | − | 44710860 | TTGTTCTGTTGATTTGTCGG | 778 | −657 |
| gRNA039 | − | 44710861 | TTTGTTCTGTTGATTTGTCG | 779 | −656 |
| gRNA040 | − | 44710862 | CTTTGTTCTGTTGATTTGTC | 780 | −655 |
| gRNA041 | − | 44710863 | TCTTTGTTCTGTTGATTTGT | 781 | −654 |
| gRNA042 | + | 44710861 | AGAAAATTACCTAAACAGCA | 782 | −656 |
| gRNA043 | + | 44710868 | TACCTAAACAGCAAGGACAT | 783 | −649 |
| gRNA044 | + | 44710869 | ACCTAAACAGCAAGGACATA | 784 | −648 |
| gRNA045 | − | 44710892 | TCCCTATGTCCTTGCTGTTT | 785 | −625 |
| gRNA046 | + | 44710872 | TAAACAGCAAGGACATAGGG | 786 | −645 |
| gRNA047 | + | 44710882 | GGACATAGGGAGGAACTTCT | 787 | −635 |
| gRNA048 | − | 44710938 | TCCCTTCAGGAAAAAGTGTT | 788 | −579 |
| gRNA049 | − | 44710951 | CTTGCTTCTTGTATCCCTTC | 789 | −566 |
| gRNA050 | + | 44710934 | AGGGATACAAGAAGCAAGAA | 790 | −583 |
| gRNA051 | + | 44710949 | AAGAAAGGTACTCTTTCACT | 791 | −568 |
| gRNA052 | + | 44710972 | ACCTTCTCTGAGCTGTCCTC | 792 | −545 |
| gRNA053 | − | 44710995 | TCCTGAGGACAGCTCAGAGA | 793 | −522 |
| gRNA054 | − | 44711010 | ATAGTCCCAAAAGCATCCTG | 794 | −507 |
| gRNA055 | − | 44711041 | GCAGGGTTTCTCCATTCTCT | 795 | −476 |
| gRNA056 | − | 44711042 | TGCAGGGTTTCTCCATTCTC | 796 | −475 |
| gRNA057 | + | 44711022 | AGAGAATGGAGAAACCCTGC | 797 | −495 |
| gRNA058 | + | 44711023 | GAGAATGGAGAAACCCTGCA | 798 | −494 |
| gRNA059 | − | 44711058 | CAGCTTGGGAATTCCCTGCA | 799 | −459 |
| gRNA060 | − | 44711059 | ACAGCTTGGGAATTCCCTGC | 800 | −458 |
| gRNA061 | − | 44711072 | TCTGTTTATAACTACAGCTT | 801 | −445 |
| gRNA062 | − | 44711073 | TTCTGTTTATAACTACAGCT | 802 | −444 |
| gRNA063 | + | 44711068 | ACAGAAGTTCTCCTTCTGCT | 803 | −449 |
| gRNA064 | − | 44711101 | TTTGAATGCTACCTAGCAGA | 804 | −416 |
| gRNA065 | + | 44711095 | ATTCAAAGATCTTAATCTTC | 805 | −422 |
| gRNA066 | + | 44711096 | TTCAAAGATCTTAATCTTCT | 806 | −421 |
| gRNA067 | + | 44711142 | TGCAGGTCCGAGCAGTTAAC | 807 | −375 |
| gRNA068 | + | 44711146 | GGTCCGAGCAGTTAACTGGC | 808 | −371 |
| gRNA069 | + | 44711147 | GTCCGAGCAGTTAACTGGCT | 809 | −370 |
| gRNA070 | + | 44711148 | TCCGAGCAGTTAACTGGCTG | 810 | −369 |
| gRNA071 | − | 44711171 | GCCCCAGCCAGTTAACTGCT | 811 | −346 |
| gRNA072 | − | 44711195 | GATGCTAAGTGACTTGCTAA | 812 | −322 |
| gRNA073 | + | 44711178 | AGCAAGTCACTTAGCATCTC | 813 | −339 |
| gRNA074 | + | 44711179 | GCAAGTCACTTAGCATCTCT | 814 | −338 |
| gRNA075 | + | 44711180 | CAAGTCACTTAGCATCTCTG | 815 | −337 |
| gRNA076 | + | 44711198 | TGGGGCCAGTCTGCAAAGCG | 816 | −319 |
| gRNA077 | + | 44711199 | GGGGCCAGTCTGCAAAGCGA | 817 | −318 |
| gRNA078 | + | 44711200 | GGGCCAGTCTGCAAAGCGAG | 818 | −317 |
| gRNA079 | + | 44711201 | GGCCAGTCTGCAAAGCGAGG | 819 | −316 |
| gRNA080 | − | 44711225 | TGCCCCCTCGCTTTGCAGAC | 820 | −292 |
| gRNA081 | − | 44711249 | TTCAGGCTGGAGGCACATTA | 821 | −268 |
| gRNA082 | − | 44711259 | ATTCTAGGACTTCAGGCTGG | 822 | −258 |
| gRNA083 | − | 44711262 | CTCATTCTAGGACTTCAGGC | 823 | −255 |
| gRNA084 | − | 44711266 | GGCGCTCATTCTAGGACTTC | 824 | −251 |
| gRNA085 | + | 44711247 | GAAGTCCTAGAATGAGCGCC | 825 | −270 |
| gRNA086 | − | 44711274 | GGACACCGGGCGCTCATTCT | 826 | −243 |
| gRNA087 | + | 44711260 | GAGCGCCCGGTGTCCCAAGC | 827 | −257 |
| gRNA088 | + | 44711261 | AGCGCCCGGTGTCCCAAGCT | 828 | −256 |
| gRNA089 | + | 44711262 | GCGCCCGGTGTCCCAAGCTG | 829 | −255 |
| gRNA090 | − | 44711287 | GCGCCCCAGCTTGGGACACC | 830 | −230 |
| gRNA091 | − | 44711288 | CGCGCCCCAGCTTGGGACAC | 831 | −229 |
| gRNA092 | − | 44711295 | TGGGGTGCGCGCCCCAGCTT | 832 | −222 |
| gRNA093 | − | 44711296 | CTGGGGTGCGCGCCCCAGCT | 833 | −221 |
| gRNA094 | + | 44711279 | CTGGGGCGCGCACCCCAGAT | 834 | −238 |
| gRNA095 | + | 44711282 | GGGCGCGCACCCCAGATCGG | 835 | −235 |
| gRNA096 | − | 44711313 | CATCGGCGCCCTCCGATCTG | 836 | −204 |
| gRNA097 | − | 44711314 | ACATCGGCGCCCTCCGATCT | 837 | −203 |
| gRNA098 | − | 44711315 | TACATCGGCGCCCTCCGATC | 838 | −202 |
| gRNA099 | − | 44711330 | TGAGTTTGCTGTCTGTACAT | 839 | −187 |
| gRNA100 | − | 44711353 | AAGAAGGCATGCACTAGACT | 840 | −164 |
| gRNA101 | − | 44711354 | TAAGAAGGCATGCACTAGAC | 841 | −163 |
| gRNA102 | + | 44711357 | CATCACGAGACTCTAAGAAA | 842 | −160 |
| gRNA103 | + | 44711370 | TAAGAAAAGGAAACTGAAAA | 843 | −147 |
| gRNA104 | + | 44711371 | AAGAAAAGGAAACTGAAAAC | 844 | −146 |
| gRNA105 | − | 44711421 | GCAGTGCCAGGTTAGAGAGA | 845 | −96 |
| gRNA106 | − | 44711422 | CGCAGTGCCAGGTTAGAGAG | 846 | −95 |
| gRNA107 | + | 44711407 | CTAACCTGGCACTGCGTCGC | 847 | −110 |
| gRNA108 | − | 44711433 | CAAGCCAGCGACGCAGTGCC | 848 | −84 |
| gRNA109 | + | 44711412 | CTGGCACTGCGTCGCTGGCT | 849 | −105 |
| gRNA110 | + | 44711419 | TGCGTCGCTGGCTTGGAGAC | 850 | −98 |
| gRNA111 | + | 44711425 | GCTGGCTTGGAGACAGGTGA | 851 | −92 |
| gRNA112 | + | 44711434 | GAGACAGGTGACGGTCCCTG | 852 | −83 |
| gRNA113 | + | 44711435 | AGACAGGTGACGGTCCCTGC | 853 | −82 |
| gRNA114 | − | 44711471 | CAATCAGGACAAGGCCCGCA | 854 | −46 |
| gRNA115 | − | 44711472 | CCAATCAGGACAAGGCCCGC | 855 | −45 |
| gRNA116 | + | 44711450 | CCTGCGGGCCTTGTCCTGAT | 856 | −67 |
| gRNA117 | + | 44711454 | CGGGCCTTGTCCTGATTGGC | 857 | −63 |
| gRNA118 | − | 44711486 | AAACGCGTGCCCAGCCAATC | 858 | −31 |
| gRNA119 | + | 44711475 | GGGCACGCGTTTAATATAAG | 859 | −42 |
| gRNA120 | + | 44711489 | TATAAGTGGAGGCGTCGCGC | 860 | −28 |
| gRNA121 | + | 44711493 | AGTGGAGGCGTCGCGCTGGC | 861 | −24 |
| gRNA122 | + | 44711540 | GGCCGAGATGTCTCGCTCCG | 862 | 23 |
| gRNA123 | + | 44711574 | CTCGCGCTACTCTCTCTTTC | 863 | 57 |
| gRNA124 | + | 44711579 | GCTACTCTCTCTTTCTGGCC | 864 | 62 |
| gRNA125 | − | 44711631 | AGGGTAGGAGAGACTCACGC | 865 | 114 |
| gRNA126 | + | 44711619 | TCTCTCCTACCCTCCCGCTC | 866 | 102 |
| gRNA127 | − | 44711646 | AAGGACCAGAGCGGGAGGGT | 867 | 129 |
| gRNA128 | − | 44711651 | AGAGGAAGGACCAGAGCGGG | 868 | 134 |
| gRNA129 | − | 44711654 | GGGAGAGGAAGGACCAGAGC | 869 | 137 |
| gRNA130 | − | 44711655 | CGGGAGAGGAAGGACCAGAG | 870 | 138 |
| gRNA131 | − | 44711669 | CAGAGGGTGCAGAGCGGGAG | 871 | 152 |
| gRNA132 | + | 44711650 | CTCCCGCTCTGCACCCTCTG | 872 | 133 |
| gRNA133 | − | 44711674 | GGCCACAGAGGGTGCAGAGC | 873 | 157 |
| gRNA134 | − | 44711675 | GGGCCACAGAGGGTGCAGAG | 874 | 158 |
| gRNA135 | − | 44711685 | AGCACAGCGAGGGCCACAGA | 875 | 168 |
| gRNA136 | − | 44711686 | GAGCACAGCGAGGGCCACAG | 876 | 169 |
| gRNA137 | − | 44711695 | GGAGCGAGAGAGCACAGCGA | 877 | 178 |
| gRNA138 | − | 44711696 | CGGAGCGAGAGAGCACAGCG | 878 | 179 |
| gRNA139 | − | 44711716 | AACTTGGAGAAGGGAAGTCA | 879 | 199 |
| gRNA140 | + | 44711702 | TCCCTTCTCCAAGTTCTCCT | 880 | 185 |
| gRNA141 | − | 44711725 | ACCAAGGAGAACTTGGAGAA | 881 | 208 |
| gRNA142 | − | 44711726 | CACCAAGGAGAACTTGGAGA | 882 | 209 |
| gRNA143 | + | 44711705 | CTTCTCCAAGTTCTCCTTGG | 883 | 188 |
| gRNA144 | − | 44711732 | GCGGGCCACCAAGGAGAACT | 884 | 215 |
| gRNA145 | + | 44711715 | TTCTCCTTGGTGGCCCGCCG | 885 | 198 |
| gRNA146 | + | 44711716 | TCTCCTTGGTGGCCCGCCGT | 886 | 199 |
| gRNA147 | + | 44711717 | CTCCTTGGTGGCCCGCCGTG | 887 | 200 |
| gRNA148 | − | 44711741 | AGCCCCACGGCGGGCCACCA | 888 | 224 |
| gRNA149 | + | 44711727 | GCCCGCCGTGGGGCTAGTCC | 889 | 210 |
| gRNA150 | + | 44711728 | CCCGCCGTGGGGCTAGTCCA | 890 | 211 |
| gRNA151 | − | 44711750 | CCCTGGACTAGCCCCACGGC | 891 | 233 |
| gRNA152 | − | 44711751 | GCCCTGGACTAGCCCCACGG | 892 | 234 |
| gRNA153 | − | 44711754 | CCAGCCCTGGACTAGCCCCA | 893 | 237 |
| gRNA154 | + | 44711732 | CCGTGGGGCTAGTCCAGGGC | 894 | 215 |
| gRNA155 | + | 44711739 | GCTAGTCCAGGGCTGGATCT | 895 | 222 |
| gRNA156 | + | 44711740 | CTAGTCCAGGGCTGGATCTC | 896 | 223 |
| gRNA157 | + | 44711741 | TAGTCCAGGGCTGGATCTCG | 897 | 224 |
| gRNA158 | − | 44711767 | GCTTCCCCGAGATCCAGCCC | 898 | 250 |
| gRNA159 | + | 44711747 | AGGGCTGGATCTCGGGGAAG | 899 | 230 |
| gRNA160 | + | 44711750 | GCTGGATCTCGGGGAAGCGG | 900 | 233 |
| gRNA161 | + | 44711751 | CTGGATCTCGGGGAAGCGGC | 901 | 234 |
| gRNA162 | + | 44711752 | TGGATCTCGGGGAAGCGGCG | 902 | 235 |
| gRNA163 | + | 44711755 | ATCTCGGGGAAGCGGCGGGG | 903 | 238 |
| gRNA164 | + | 44711760 | GGGGAAGCGGCGGGGTGGCC | 904 | 243 |
| gRNA165 | + | 44711761 | GGGAAGCGGCGGGGTGGCCT | 905 | 244 |
| gRNA166 | + | 44711766 | GCGGCGGGGTGGCCTGGGAG | 906 | 249 |
| gRNA167 | + | 44711767 | CGGCGGGGTGGCCTGGGAGT | 907 | 250 |
| gRNA168 | + | 44711768 | GGCGGGGTGGCCTGGGAGTG | 908 | 251 |
| gRNA169 | + | 44711772 | GGGTGGCCTGGGAGTGGGGA | 909 | 255 |
| gRNA170 | + | 44711773 | GGTGGCCTGGGAGTGGGGAA | 910 | 256 |
| gRNA171 | + | 44711774 | GTGGCCTGGGAGTGGGGAAG | 911 | 257 |
| gRNA172 | + | 44711775 | TGGCCTGGGAGTGGGGAAGG | 912 | 258 |
| gRNA173 | + | 44711786 | TGGGGAAGGGGGTGCGCACC | 913 | 269 |
| gRNA174 | + | 44711787 | GGGGAAGGGGGTGCGCACCC | 914 | 270 |
| gRNA175 | − | 44711826 | GGGCAAGTAGCGCGCGTCCC | 915 | 309 |
| gRNA176 | − | 44711827 | GGGGCAAGTAGCGCGCGTCC | 916 | 310 |
| gRNA177 | + | 44711811 | CGCGCGCTACTTGCCCCTTT | 917 | 294 |
| gRNA178 | + | 44711814 | GCGCTACTTGCCCCTTTCGG | 918 | 297 |
| gRNA179 | + | 44711815 | CGCTACTTGCCCCTTTCGGC | 919 | 298 |
| gRNA180 | + | 44711822 | TGCCCCTTTCGGCGGGGAGC | 920 | 305 |
| gRNA181 | + | 44711823 | GCCCCTTTCGGCGGGGAGCA | 921 | 306 |
| gRNA182 | − | 44711846 | CCCCTGCTCCCCGCCGAAAG | 922 | 329 |
| gRNA183 | + | 44711824 | CCCCTTTCGGCGGGGAGCAG | 923 | 307 |
| gRNA184 | − | 44711847 | TCCCCTGCTCCCCGCCGAAA | 924 | 330 |
| gRNA185 | − | 44711848 | CTCCCCTGCTCCCCGCCGAA | 925 | 331 |
| gRNA186 | + | 44711834 | CGGGGAGCAGGGGAGACCTT | 926 | 317 |
| gRNA187 | + | 44711841 | CAGGGGAGACCTTTGGCCTA | 927 | 324 |
| gRNA188 | + | 44711847 | AGACCTTTGGCCTACGGCGA | 928 | 330 |
| gRNA189 | + | 44711848 | GACCTTTGGCCTACGGCGAC | 929 | 331 |
| gRNA190 | − | 44711872 | CTCCCGTCGCCGTAGGCCAA | 930 | 355 |
| gRNA191 | + | 44711851 | CTTTGGCCTACGGCGACGGG | 931 | 334 |
| gRNA192 | + | 44711852 | TTTGGCCTACGGCGACGGGA | 932 | 335 |
| gRNA193 | + | 44711856 | GCCTACGGCGACGGGAGGGT | 933 | 339 |
| gRNA194 | − | 44711879 | CCCGACCCTCCCGTCGCCGT | 934 | 362 |
| gRNA195 | + | 44711857 | CCTACGGCGACGGGAGGGTC | 935 | 340 |
| gRNA196 | + | 44711869 | GGAGGGTCGGGACAAAGTTT | 936 | 352 |
| gRNA197 | + | 44711870 | GAGGGTCGGGACAAAGTTTA | 937 | 353 |
| gRNA198 | + | 44711896 | CGATAAGCGTCAGAGCGCCG | 938 | 379 |
| gRNA199 | + | 44711900 | AAGCGTCAGAGCGCCGAGGT | 939 | 383 |
| gRNA200 | + | 44711901 | AGCGTCAGAGCGCCGAGGTT | 940 | 384 |
| gRNA201 | + | 44711902 | GCGTCAGAGCGCCGAGGTTG | 941 | 385 |
| gRNA202 | + | 44711903 | CGTCAGAGCGCCGAGGTTGG | 942 | 386 |
| gRNA203 | + | 44711906 | CAGAGCGCCGAGGTTGGGGG | 943 | 389 |
| gRNA204 | + | 44711907 | AGAGCGCCGAGGTTGGGGGA | 944 | 390 |
| gRNA205 | − | 44711935 | GAGAAACCCTCCCCCAACCT | 945 | 418 |
| gRNA206 | + | 44711929 | GTTTCTCTTCCGCTCTTTCG | 946 | 412 |
| gRNA207 | + | 44711930 | TTTCTCTTCCGCTCTTTCGC | 947 | 413 |
| gRNA208 | + | 44711931 | TTCTCTTCCGCTCTTTCGCG | 948 | 414 |
| gRNA209 | − | 44711960 | CCAGAGGCCCCGCGAAAGAG | 949 | 443 |
| gRNA210 | + | 44711938 | CCGCTCTTTCGCGGGGCCTC | 950 | 421 |
| gRNA211 | − | 44711976 | AGCTGCGCTGGGGGAGCCAG | 951 | 459 |
| gRNA212 | + | 44711956 | TCTGGCTCCCCCAGCGCAGC | 952 | 439 |
| gRNA213 | + | 44711961 | CTCCCCCAGCGCAGCTGGAG | 953 | 444 |
| gRNA214 | + | 44711962 | TCCCCCAGCGCAGCTGGAGT | 954 | 445 |
| gRNA215 | − | 44711985 | CCCCACTCCAGCTGCGCTGG | 955 | 468 |
| gRNA216 | + | 44711963 | CCCCCAGCGCAGCTGGAGTG | 956 | 446 |
| gRNA217 | + | 44711964 | CCCCAGCGCAGCTGGAGTGG | 957 | 447 |
| gRNA218 | − | 44711986 | CCCCCACTCCAGCTGCGCTG | 958 | 469 |
| gRNA219 | − | 44711987 | TCCCCCACTCCAGCTGCGCT | 959 | 470 |
| gRNA220 | − | 44711988 | GTCCCCCACTCCAGCTGCGC | 960 | 471 |
| gRNA221 | + | 44711968 | AGCGCAGCTGGAGTGGGGGA | 961 | 451 |
| gRNA222 | + | 44711973 | AGCTGGAGTGGGGGACGGGT | 962 | 456 |
| gRNA223 | + | 44711986 | GACGGGTAGGCTCGTCCCAA | 963 | 469 |
| gRNA224 | + | 44711991 | GTAGGCTCGTCCCAAAGGCG | 964 | 474 |
| gRNA225 | + | 44711999 | GTCCCAAAGGCGCGGCGCTG | 965 | 482 |
| gRNA226 | − | 44712023 | AACCTCAGCGCCGCGCCTTT | 966 | 506 |
| gRNA227 | − | 44712024 | AAACCTCAGCGCCGCGCCTT | 967 | 507 |
| gRNA228 | + | 44712014 | CGCTGAGGTTTGTGAACGCG | 968 | 497 |
| gRNA229 | + | 44712017 | TGAGGTTTGTGAACGCGTGG | 969 | 500 |
| gRNA230 | + | 44712018 | GAGGTTTGTGAACGCGTGGA | 970 | 501 |
| gRNA231 | + | 44712019 | AGGTTTGTGAACGCGTGGAG | 971 | 502 |
| gRNA232 | + | 44712026 | TGAACGCGTGGAGGGGCGCT | 972 | 509 |
| gRNA233 | + | 44712027 | GAACGCGTGGAGGGGCGCTT | 973 | 510 |
| gRNA234 | + | 44712028 | AACGCGTGGAGGGGCGCTTG | 974 | 511 |
| gRNA235 | + | 44712033 | GTGGAGGGGCGCTTGGGGTC | 975 | 516 |
| gRNA236 | + | 44712034 | TGGAGGGGCGCTTGGGGTCT | 976 | 517 |
| gRNA237 | + | 44712035 | GGAGGGGCGCTTGGGGTCTG | 977 | 518 |
| gRNA238 | + | 44712036 | GAGGGGCGCTTGGGGTCTGG | 978 | 519 |
| gRNA239 | + | 44712039 | GGGCGCTTGGGGTCTGGGGG | 979 | 522 |
| gRNA240 | + | 44712049 | GGTCTGGGGGAGGCGTCGCC | 980 | 532 |
| gRNA241 | + | 44712050 | GTCTGGGGGAGGCGTCGCCC | 981 | 533 |
| gRNA242 | − | 44712089 | CGCAGCAGACAGGCTTACCC | 982 | 572 |
| gRNA243 | − | 44712090 | CCGCAGCAGACAGGCTTACC | 983 | 573 |
| gRNA244 | + | 44712068 | CCGGGTAAGCCTGTCTGCTG | 984 | 551 |
| gRNA245 | − | 44712099 | GAAGCAGAGCCGCAGCAGAC | 985 | 582 |
| gRNA246 | + | 44712088 | CGGCTCTGCTTCCCTTAGAC | 986 | 571 |
| gRNA247 | + | 44712098 | TCCCTTAGACTGGAGAGCTG | 987 | 581 |
| gRNA248 | − | 44712121 | TCCACAGCTCTCCAGTCTAA | 988 | 604 |
| gRNA249 | − | 44712122 | GTCCACAGCTCTCCAGTCTA | 989 | 605 |
| gRNA250 | + | 44712110 | GAGAGCTGTGGACTTCGTCT | 990 | 593 |
| gRNA251 | − | 44712157 | CTAGGACATGCGAACTTAGC | 991 | 640 |
| gRNA252 | − | 44712158 | GCTAGGACATGCGAACTTAG | 992 | 641 |
| gRNA253 | + | 44712144 | TTCGCATGTCCTAGCACCTC | 993 | 627 |
| gRNA254 | + | 44712145 | TCGCATGTCCTAGCACCTCT | 994 | 628 |
| gRNA255 | − | 44712175 | CACATAGACCCAGAGGTGCT | 995 | 658 |
| gRNA256 | + | 44712154 | CTAGCACCTCTGGGTCTATG | 996 | 637 |
| gRNA257 | + | 44712155 | TAGCACCTCTGGGTCTATGT | 997 | 638 |
| gRNA258 | + | 44712156 | AGCACCTCTGGGTCTATGTG | 998 | 639 |
| gRNA259 | − | 44712182 | GTGGCCCCACATAGACCCAG | 999 | 665 |
| gRNA260 | + | 44712167 | GTCTATGTGGGGCCACACCG | 1000 | 650 |
| gRNA261 | + | 44712168 | TCTATGTGGGGCCACACCGT | 1001 | 651 |
| gRNA262 | + | 44712169 | CTATGTGGGGCCACACCGTG | 1002 | 652 |
| gRNA263 | + | 44712172 | TGTGGGGCCACACCGTGGGG | 1003 | 655 |
| gRNA264 | − | 44712201 | GCTGTTTCCTCCCCACGGTG | 1004 | 684 |
| gRNA265 | − | 44712206 | CGCGTGCTGTTTCCTCCCCA | 1005 | 689 |
| gRNA266 | + | 44712203 | CGCGACGTTTGTAGAATGCT | 1006 | 686 |
| gRNA267 | + | 44712219 | TGCTTGGCTGTGATACAAAG | 1007 | 702 |
| gRNA268 | − | 44712325 | CACAGAAAGATGTCAATAAC | 1008 | 808 |
| gRNA269 | − | 44712326 | ACACAGAAAGATGTCAATAA | 1009 | 809 |
| gRNA270 | + | 44712311 | TGACATCTTTCTGTGTGCCA | 1010 | 794 |
| gRNA271 | | 44711968 | GCGCAGCTGGAGTGGGGGAC | 1011 | 451 |

TABLE 3
Exemplary Targeting Sequences of
gRNAs Targeting B2M

| gRNA | gRNA Targeting Sequence | |
|---|---|---|
| No. | (5′ to 3′) | SEQ |
| gRNA001 | GGCGCGCACCCCAGAUCGGA | 1012 |
| gRNA002 | GAGUCUCGUGAUGUUUAAGA | 1013 |
| gRNA003 | GAAAGUCCCUCUCUCUAACC | 1014 |
| gRNA004 | GUGCCCAGCCAAUCAGGACA | 1015 |
| gRNA005 | GCCCGAAUGCUGUCAGCUUC | 1016 |
| gRNA006 | CGCGAGCACAGCUAAGGCCA | 1017 |
| gRNA007 | ACUCUCUCUUUCUGGCCUGG | 1018 |
| gRNA008 | GAGGAAGGACCAGAGCGGGA | 1019 |
| gRNA009 | GGGCCUUGUCCUGAUUGGCU | 1020 |
| gRNA010 | CACGCGUUUAAUAUAAGUGG | 1021 |
| gRNA011 | AAGUGGAGGCGUCGCGCUGG | 1022 |
| gRNA012 | UUCCUGAAGCUGACAGCAUU | 1023 |
| gRNA013 | UCCUGAAGCUGACAGCAUUC | 1024 |
| gRNA014 | GGCCACGGAGCGAGACAUCU | 1025 |
| gRNA015 | GAGUAGCGCGAGCACAGCUA | 1026 |
| gRNA016 | ACUCACGCUGGAUAGCCUCC | 1027 |
| gRNA017 | GGGUGCAGAGCGGGAGAGGA | 1028 |
| gRNA018 | GCACCCCCUUCCCCACUCCC | 1029 |
| gRNA019 | GCUACUUGCCCCUUUCGGCG | 1030 |
| gRNA020 | UGCCAGCCCCUGUUCUAGGG | 1031 |
| gRNA021 | UUCCACCCUAGAACAGGGGC | 1032 |
| gRNA022 | UAGUUUCCACCCUAGAACAG | 1033 |
| gRNA023 | UUAGUUUCCACCCUAGAACA | 1034 |
| gRNA024 | CUUAGUUUCCACCCUAGAAC | 1035 |
| gRNA025 | UAAGAGAAUGAUGUACCUAG | 1036 |
| gRNA026 | AAGAGAAUGAUGUACCUAGA | 1037 |
| gRNA027 | AUGAUGUACCUAGAGGGCGC | 1038 |
| gRNA028 | UAGAGCUUCCAGCGCCCUCU | 1039 |
| gRNA029 | AGUAAAAGCAGUAACUGCUA | 1040 |
| gRNA030 | UAGUAAAAGCAGUAACUGCU | 1041 |
| gRNA031 | UGAUUUGUCGGGGGGCGGGG | 1042 |
| gRNA032 | UUGAUUUGUCGGGGGGCGGG | 1043 |
| gRNA033 | GUUGAUUUGUCGGGGGGCGG | 1044 |
| gRNA034 | UGUUGAUUUGUCGGGGGGCG | 1045 |
| gRNA035 | CUGUUGAUUUGUCGGGGGGC | 1046 |
| gRNA036 | UCUGUUGAUUUGUCGGGGGG | 1047 |
| gRNA037 | UGUUCUGUUGAUUUGUCGGG | 1048 |
| gRNA038 | UUGUUCUGUUGAUUUGUCGG | 1049 |
| gRNA039 | UUUGUUCUGUUGAUUUGUCG | 1050 |
| gRNA040 | CUUUGUUCUGUUGAUUUGUC | 1051 |
| gRNA041 | UCUUUGUUCUGUUGAUUUGU | 1052 |
| gRNA042 | AGAAAAUUACCUAAACAGCA | 1053 |
| gRNA043 | UACCUAAACAGCAAGGACAU | 1054 |
| gRNA044 | ACCUAAACAGCAAGGACAUA | 1055 |
| gRNA045 | UCCCUAUGUCCUUGCUGUUU | 1056 |
| gRNA046 | UAAACAGCAAGGACAUAGGG | 1057 |
| gRNA047 | GGACAUAGGGAGGAACUUCU | 1058 |
| gRNA048 | UCCCUUCAGGAAAAAGUGUU | 1059 |
| gRNA049 | CUUGCUUCUUGUAUCCCUUC | 1060 |
| gRNA050 | AGGGAUACAAGAAGCAAGAA | 1061 |
| gRNA051 | AAGAAAGGUACUCUUUCACU | 1062 |
| gRNA052 | ACCUUCUCUGAGCUGUCCUC | 1063 |
| gRNA053 | UCCUGAGGACAGCUCAGAGA | 1064 |
| gRNA054 | AUAGUCCCAAAAGCAUCCUG | 1065 |
| gRNA055 | GCAGGGUUUCUCCAUUCUCU | 1066 |
| gRNA056 | UGCAGGGUUUCUCCAUUCUC | 1067 |
| gRNA057 | AGAGAAUGGAGAAACCCUGC | 1068 |
| gRNA058 | GAGAAUGGAGAAACCCUGCA | 1069 |
| gRNA059 | CAGCUUGGGAAUUCCCUGCA | 1070 |
| gRNA060 | ACAGCUUGGGAAUUCCCUGC | 1071 |
| gRNA061 | UCUGUUUAUAACUACAGCUU | 1072 |
| gRNA062 | UUCUGUUUAUAACUACAGCU | 1073 |
| gRNA063 | ACAGAAGUUCUCCUUCUGCU | 1074 |
| gRNA064 | UUUGAAUGCUACCUAGCAGA | 1075 |
| gRNA065 | AUUCAAAGAUCUUAAUCUUC | 1076 |
| gRNA066 | UUCAAAGAUCUUAAUCUUCU | 1077 |
| gRNA067 | UGCAGGUCCGAGCAGUUAAC | 1078 |
| gRNA068 | GGUCCGAGCAGUUAACUGGC | 1079 |
| gRNA069 | GUCCGAGCAGUUAACUGGCU | 1080 |
| gRNA070 | UCCGAGCAGUUAACUGGCUG | 1081 |
| gRNA071 | GCCCCAGCCAGUUAACUGCU | 1082 |
| gRNA072 | GAUGCUAAGUGACUUGCUAA | 1083 |
| gRNA073 | AGCAAGUCACUUAGCAUCUC | 1084 |
| gRNA074 | GCAAGUCACUUAGCAUCUCU | 1085 |
| gRNA075 | CAAGUCACUUAGCAUCUCUG | 1086 |
| gRNA076 | UGGGGCCAGUCUGCAAAGCG | 1087 |
| gRNA077 | GGGGCCAGUCUGCAAAGCGA | 1088 |
| gRNA078 | GGGCCAGUCUGCAAAGCGAG | 1089 |
| gRNA079 | GGCCAGUCUGCAAAGCGAGG | 1090 |
| gRNA080 | UGCCCCCUCGCUUUGCAGAC | 1091 |
| gRNA081 | UUCAGGCUGGAGGCACAUUA | 1092 |
| gRNA082 | AUUCUAGGACUUCAGGCUGG | 1093 |
| gRNA083 | CUCAUUCUAGGACUUCAGGC | 1094 |
| gRNA084 | GGCGCUCAUUCUAGGACUUC | 1095 |
| gRNA085 | GAAGUCCUAGAAUGAGCGCC | 1096 |
| gRNA086 | GGACACCGGGCGCUCAUUCU | 1097 |
| gRNA087 | GAGCGCCCGGUGUCCCAAGC | 1098 |
| gRNA088 | AGCGCCCGGUGUCCCAAGCU | 1099 |
| gRNA089 | GCGCCCGGUGUCCCAAGCUG | 1100 |
| gRNA090 | GCGCCCCAGCUUGGGACACC | 1101 |
| gRNA091 | CGCGCCCCAGCUUGGGACAC | 1102 |
| gRNA092 | UGGGGUGCGCGCCCCAGCUU | 1103 |
| gRNA093 | CUGGGGUGCGCGCCCCAGCU | 1104 |
| gRNA094 | CUGGGGCGCGCACCCCAGAU | 1105 |
| gRNA095 | GGGCGCGCACCCCAGAUCGG | 1106 |
| gRNA096 | CAUCGGCGCCCUCCGAUCUG | 1107 |
| gRNA097 | ACAUCGGCGCCCUCCGAUCU | 1108 |
| gRNA098 | UACAUCGGCGCCCUCCGAUC | 1109 |
| gRNA099 | UGAGUUUGCUGUCUGUACAU | 1110 |
| gRNA100 | AAGAAGGCAUGCACUAGACU | 1111 |
| gRNA101 | UAAGAAGGCAUGCACUAGAC | 1112 |
| gRNA102 | CAUCACGAGACUCUAAGAAA | 1113 |
| gRNA103 | UAAGAAAAGGAAACUGAAAA | 1114 |
| gRNA104 | AAGAAAAGGAAACUGAAAAC | 1115 |
| gRNA105 | GCAGUGCCAGGUUAGAGAGA | 1116 |
| gRNA106 | CGCAGUGCCAGGUUAGAGAG | 1117 |
| gRNA107 | CUAACCUGGCACUGCGUCGC | 1118 |
| gRNA108 | CAAGCCAGCGACGCAGUGCC | 1119 |
| gRNA109 | CUGGCACUGCGUCGCUGGCU | 1120 |
| gRNA110 | UGCGUCGCUGGCUUGGAGAC | 1121 |
| gRNA111 | GCUGGCUUGGAGACAGGUGA | 1122 |
| gRNA112 | GAGACAGGUGACGGUCCCUG | 1123 |
| gRNA113 | AGACAGGUGACGGUCCCUGC | 1124 |
| gRNA114 | CAAUCAGGACAAGGCCCGCA | 1125 |
| gRNA115 | CCAAUCAGGACAAGGCCCGC | 1126 |
| gRNA116 | CCUGCGGGCCUUGUCCUGAU | 1127 |
| gRNA117 | CGGGCCUUGUCCUGAUUGGC | 1128 |
| gRNA118 | AAACGCGUGCCCAGCCAAUC | 1129 |
| gRNA119 | GGGCACGCGUUUAAUAUAAG | 1130 |
| gRNA120 | UAUAAGUGGAGGCGUCGCGC | 1131 |
| gRNA121 | AGUGGAGGCGUCGCGCUGGC | 1132 |
| gRNA122 | GGCCGAGAUGUCUCGCUCCG | 1133 |
| gRNA123 | CUCGCGCUACUCUCUCUUUC | 1134 |
| gRNA124 | GCUACUCUCUCUUUCUGGCC | 1135 |
| gRNA125 | AGGGUAGGAGAGACUCACGC | 1136 |
| gRNA126 | UCUCUCCUACCCUCCCGCUC | 1137 |
| gRNA127 | AAGGACCAGAGCGGGAGGGU | 1138 |
| gRNA128 | AGAGGAAGGACCAGAGCGGG | 1139 |
| gRNA129 | GGGAGAGGAAGGACCAGAGC | 1140 |
| gRNA130 | CGGGAGAGGAAGGACCAGAG | 1141 |
| gRNA131 | CAGAGGGUGCAGAGCGGGAG | 1142 |
| gRNA132 | CUCCCGCUCUGCACCCUCUG | 1143 |
| gRNA133 | GGCCACAGAGGGUGCAGAGC | 1144 |
| gRNA134 | GGGCCACAGAGGGUGCAGAG | 1145 |
| gRNA135 | AGCACAGCGAGGGCCACAGA | 1146 |
| gRNA136 | GAGCACAGCGAGGGCCACAG | 1147 |
| gRNA137 | GGAGCGAGAGAGCACAGCGA | 1148 |
| gRNA138 | CGGAGCGAGAGAGCACAGCG | 1149 |
| gRNA139 | AACUUGGAGAAGGGAAGUCA | 1150 |
| gRNA140 | UCCCUUCUCCAAGUUCUCCU | 1151 |
| gRNA141 | ACCAAGGAGAACUUGGAGAA | 1152 |
| gRNA142 | CACCAAGGAGAACUUGGAGA | 1153 |
| gRNA143 | CUUCUCCAAGUUCUCCUUGG | 1154 |
| gRNA144 | GCGGGCCACCAAGGAGAACU | 1155 |
| gRNA145 | UUCUCCUUGGUGGCCCGCCG | 1156 |
| gRNA146 | UCUCCUUGGUGGCCCGCCGU | 1157 |
| gRNA147 | CUCCUUGGUGGCCCGCCGUG | 1158 |
| gRNA148 | AGCCCCACGGCGGGCCACCA | 1159 |
| gRNA149 | GCCCGCCGUGGGGCUAGUCC | 1160 |
| gRNA150 | CCCGCCGUGGGGCUAGUCCA | 1161 |
| gRNA151 | CCCUGGACUAGCCCCACGGC | 1162 |
| gRNA152 | GCCCUGGACUAGCCCCACGG | 1163 |
| gRNA153 | CCAGCCCUGGACUAGCCCCA | 1164 |
| gRNA154 | CCGUGGGGCUAGUCCAGGGC | 1165 |
| gRNA155 | GCUAGUCCAGGGCUGGAUCU | 1166 |
| gRNA156 | CUAGUCCAGGGCUGGAUCUC | 1167 |
| gRNA157 | UAGUCCAGGGCUGGAUCUCG | 1168 |
| gRNA158 | GCUUCCCCGAGAUCCAGCCC | 1169 |
| gRNA159 | AGGGCUGGAUCUCGGGGAAG | 1170 |
| gRNA160 | GCUGGAUCUCGGGGAAGCGG | 1171 |
| gRNA161 | CUGGAUCUCGGGGAAGCGGC | 1172 |
| gRNA162 | UGGAUCUCGGGGAAGCGGCG | 1173 |
| gRNA163 | AUCUCGGGGAAGCGGCGGGG | 1174 |
| gRNA164 | GGGGAAGCGGCGGGGUGGCC | 1175 |
| gRNA165 | GGGAAGCGGCGGGGUGGCCU | 1176 |
| gRNA166 | GCGGCGGGGUGGCCUGGGAG | 1177 |
| gRNA167 | CGGCGGGGUGGCCUGGGAGU | 1178 |
| gRNA168 | GGCGGGGUGGCCUGGGAGUG | 1179 |
| gRNA169 | GGGUGGCCUGGGAGUGGGGA | 1180 |
| gRNA170 | GGUGGCCUGGGAGUGGGGAA | 1181 |
| gRNA171 | GUGGCCUGGGAGUGGGGAAG | 1182 |
| gRNA172 | UGGCCUGGGAGUGGGGAAGG | 1183 |
| gRNA173 | UGGGGAAGGGGGUGCGCACC | 1184 |
| gRNA174 | GGGGAAGGGGGUGCGCACCC | 1185 |
| gRNA175 | GGGCAAGUAGCGCGCGUCCC | 1186 |
| gRNA176 | GGGGCAAGUAGCGCGCGUCC | 1187 |
| gRNA177 | CGCGCGCUACUUGCCCCUUU | 1188 |
| gRNA178 | GCGCUACUUGCCCCUUUCGG | 1189 |
| gRNA179 | CGCUACUUGCCCCUUUCGGC | 1190 |
| gRNA180 | UGCCCCUUUCGGCGGGGAGC | 1191 |
| gRNA181 | GCCCCUUUCGGCGGGGAGCA | 1192 |
| gRNA182 | CCCCUGCUCCCCGCCGAAAG | 1193 |
| gRNA183 | CCCCUUUCGGCGGGGAGCAG | 1194 |
| gRNA184 | UCCCCUGCUCCCCGCCGAAA | 1195 |
| gRNA185 | CUCCCCUGCUCCCCGCCGAA | 1196 |
| gRNA186 | CGGGGAGCAGGGGAGACCUU | 1197 |
| gRNA187 | CAGGGGAGACCUUUGGCCUA | 1198 |
| gRNA188 | AGACCUUUGGCCUACGGCGA | 1199 |
| gRNA189 | GACCUUUGGCCUACGGCGAC | 1200 |
| gRNA190 | CUCCCGUCGCCGUAGGCCAA | 1201 |
| gRNA191 | CUUUGGCCUACGGCGACGGG | 1202 |
| gRNA192 | UUUGGCCUACGGCGACGGGA | 1203 |
| gRNA193 | GCCUACGGCGACGGGAGGGU | 1204 |
| gRNA194 | CCCGACCCUCCCGUCGCCGU | 1205 |
| gRNA195 | CCUACGGCGACGGGAGGGUC | 1206 |
| gRNA196 | GGAGGGUCGGGACAAAGUUU | 1207 |
| gRNA197 | GAGGGUCGGGACAAAGUUUA | 1208 |
| gRNA198 | CGAUAAGCGUCAGAGCGCCG | 1209 |
| gRNA199 | AAGCGUCAGAGCGCCGAGGU | 1210 |
| gRNA200 | AGCGUCAGAGCGCCGAGGUU | 1211 |
| gRNA201 | GCGUCAGAGCGCCGAGGUUG | 1212 |
| gRNA202 | CGUCAGAGCGCCGAGGUUGG | 1213 |
| gRNA203 | CAGAGCGCCGAGGUUGGGGG | 1214 |
| gRNA204 | AGAGCGCCGAGGUUGGGGGA | 1215 |
| gRNA205 | GAGAAACCCUCCCCCAACCU | 1216 |
| gRNA206 | GUUUCUCUUCCGCUCUUUCG | 1217 |
| gRNA207 | UUUCUCUUCCGCUCUUUCGC | 1218 |
| gRNA208 | UUCUCUUCCGCUCUUUCGCG | 1219 |
| gRNA209 | CCAGAGGCCCCGCGAAAGAG | 1220 |
| gRNA210 | CCGCUCUUUCGCGGGGCCUC | 1221 |
| gRNA211 | AGCUGCGCUGGGGGAGCCAG | 1222 |
| gRNA212 | UCUGGCUCCCCCAGCGCAGC | 1223 |
| gRNA213 | CUCCCCCAGCGCAGCUGGAG | 1224 |
| gRNA214 | UCCCCCAGCGCAGCUGGAGU | 1225 |
| gRNA215 | CCCCACUCCAGCUGCGCUGG | 1226 |
| gRNA216 | CCCCCAGCGCAGCUGGAGUG | 1227 |
| gRNA217 | CCCCAGCGCAGCUGGAGUGG | 1228 |
| gRNA218 | CCCCCACUCCAGCUGCGCUG | 1229 |
| gRNA219 | UCCCCCACUCCAGCUGCGCU | 1230 |
| gRNA220 | GUCCCCCACUCCAGCUGCGC | 1231 |
| gRNA221 | AGCGCAGCUGGAGUGGGGGA | 1232 |
| gRNA222 | AGCUGGAGUGGGGGACGGGU | 1233 |
| gRNA223 | GACGGGUAGGCUCGUCCCAA | 1234 |
| gRNA224 | GUAGGCUCGUCCCAAAGGCG | 1235 |
| gRNA225 | GUCCCAAAGGCGCGGCGCUG | 1236 |
| gRNA226 | AACCUCAGCGCCGCGCCUUU | 1237 |
| gRNA227 | AAACCUCAGCGCCGCGCCUU | 1238 |
| gRNA228 | CGCUGAGGUUUGUGAACGCG | 1239 |
| gRNA229 | UGAGGUUUGUGAACGCGUGG | 1240 |
| gRNA230 | GAGGUUUGUGAACGCGUGGA | 1241 |
| gRNA231 | AGGUUUGUGAACGCGUGGAG | 1242 |
| gRNA232 | UGAACGCGUGGAGGGGCGCU | 1243 |
| gRNA233 | GAACGCGUGGAGGGGCGCUU | 1244 |
| gRNA234 | AACGCGUGGAGGGGCGCUUG | 1245 |
| gRNA235 | GUGGAGGGGCGCUUGGGGUC | 1246 |
| gRNA236 | UGGAGGGGCGCUUGGGGUCU | 1247 |
| gRNA237 | GGAGGGGCGCUUGGGGUCUG | 1248 |
| gRNA238 | GAGGGGCGCUUGGGGUCUGG | 1249 |
| gRNA239 | GGGCGCUUGGGGUCUGGGGG | 1250 |
| gRNA240 | GGUCUGGGGGAGGCGUCGCC | 1251 |
| gRNA241 | GUCUGGGGGAGGCGUCGCCC | 1252 |
| gRNA242 | CGCAGCAGACAGGCUUACCC | 1253 |
| gRNA243 | CCGCAGCAGACAGGCUUACC | 1254 |
| gRNA244 | CCGGGUAAGCCUGUCUGCUG | 1255 |
| gRNA245 | GAAGCAGAGCCGCAGCAGAC | 1256 |
| gRNA246 | CGGCUCUGCUUCCCUUAGAC | 1257 |
| gRNA247 | UCCCUUAGACUGGAGAGCUG | 1258 |
| gRNA248 | UCCACAGCUCUCCAGUCUAA | 1259 |
| gRNA249 | GUCCACAGCUCUCCAGUCUA | 1260 |
| gRNA250 | GAGAGCUGUGGACUUCGUCU | 1261 |
| gRNA251 | CUAGGACAUGCGAACUUAGC | 1262 |
| gRNA252 | GCUAGGACAUGCGAACUUAG | 1263 |
| gRNA253 | UUCGCAUGUCCUAGCACCUC | 1264 |
| gRNA254 | UCGCAUGUCCUAGCACCUCU | 1265 |
| gRNA255 | CACAUAGACCCAGAGGUGCU | 1266 |
| gRNA256 | CUAGCACCUCUGGGUCUAUG | 1267 |
| gRNA257 | UAGCACCUCUGGGUCUAUGU | 1268 |
| gRNA258 | AGCACCUCUGGGUCUAUGUG | 1269 |
| gRNA259 | GUGGCCCCACAUAGACCCAG | 1270 |
| gRNA260 | GUCUAUGUGGGGCCACACCG | 1271 |
| gRNA261 | UCUAUGUGGGGCCACACCGU | 1272 |
| gRNA262 | CUAUGUGGGGCCACACCGUG | 1273 |
| gRNA263 | UGUGGGGCCACACCGUGGGG | 1274 |
| gRNA264 | GCUGUUUCCUCCCCACGGUG | 1275 |
| gRNA265 | CGCGUGCUGUUUCCUCCCCA | 1276 |
| gRNA266 | CGCGACGUUUGUAGAAUGCU | 1277 |
| gRNA267 | UGCUUGGCUGUGAUACAAAG | 1278 |
| gRNA268 | CACAGAAAGAUGUCAAUAAC | 1279 |
| gRNA269 | ACACAGAAAGAUGUCAAUAA | 1280 |
| gRNA270 | UGACAUCUUUCUGUGUGCCA | 1281 |
| gRNA271 | GCGCAGCUGGAGUGGGGGAC | 1282 |

[0124] In some embodiments, the target region of a guide RNA targeting B2M comprises one or more sequences selected from SEQ ID NOs: 700-740, 744, 747-749, 752, 753, 757, 758, 760-806, 812-822, 825, 827, 830, 833, 834, 839-841, 843-845, 849, 851-853, 855, 864, 866-877, 879-883, 891-896, 898-900, 903-914, 922, 923, 925-927, 934, 936, 943-947, 949, 951-962, 975-981, 983, 985, 987-989, 995, 997-999, 1003-1005, and 1007-1011. In some embodiments, a guide RNA targeting B2M comprises any one of SEQ ID NOs: 1015, 1018-1020, 1023, 1024, 1028, 1029, 1031-1077, 1083-1093, 1096, 1098, 1101, 1104, 1105, 1110-1112, 1114-1116, 1120, 1122-1124, 1126, 1135, 1137-1148, 1150-1154, 1162-1167, 1169-1171, 1174-1185, 1193, 1194, 1196-1198, 1205, 1207, 1214-1218, 1220, 1222-1233, 1246-1252, 1254, 1256, 1258-1260, 1266, 1268-1270, 1274-1276, and 1278-1282.

[0125] Any tracr sequence known in the art is contemplated for a gRNA described herein. In some embodiments, a gRNA described herein has a tracr sequence shown in Table 4 below, or a tracr sequence at least 70%, 75%, 80%, 85%, 90%, 95%, 96%, 97%, 98%, or 99% identical to the tracr sequence shown below (SEQ indicates SEQ ID NO).

TABLE 4
Exemplary TRACR Sequences

| SEQ | Sequence (5′ to 3′) |
|---|---|
| 653 | GUUUAAGAGCUAUGCUGGAAACAGCAUAGCAAG |
| | UUUAAAUAAGGCUAGUCCGUUAUCAACUUGAAA |
| | AAGUGGCACCGAGUCGGUGCUUUUUUU |
| 654 | GUUUUAGAGCUAGAAAUAGCAAGUUAAAAUAAG |
| | GCUAGUCCGUUAUCAACUUGAAAAAGUGGCACC |
| | GAGUCGGUGCUUUU |
| 655 | GUUUAAGAGCUAAGCUGGAAACAGCAUAGCAAG |
| | UUUAAAUAAGGCUAGUCCGUUAUCAACUUGAAA |
| | AAGUGGCACCGAGUCGGUGCUUUUUU |
| 656 | GUUUAAGAGCUAAGCUGGAAACAGCAUAGCAAG |
| | UUUAAAUAAGGCUAGUCCGUUAUCAACUUGAAA |
| | AAGUGGCACCGAGUCGGUGCUUUUUUU |

[0126] In some embodiments, the gRNA herein is provided to the cell directly (e.g., through an RNP complex together with the CRISPR-associated protein domain). In some embodiments, the gRNA is provided to the cell through an expression vector (e.g., a plasmid vector or a viral vector) introduced into the cell, where the cell then expresses the gRNA from the expression vector. Methods of introducing gRNAs and expression vectors into cells are well known in the art.

### III. Effector Domains

[0127] Epigenetic editors described herein include one or more effector protein domains (also “epigenetic effector domains,” or “effector domains,” as used herein) that effect epigenetic modification of a target gene. An epigenetic editor with one or more effector domains may modulate expression of a target gene without altering its nucleobase sequence. In some embodiments, an effector domain described herein may provide repression or silencing of expression of a target gene such as B2M, e.g., by repressing transcription or by modifying or remodeling chromatin. Such effector domains are also referred to herein as “repression domains,” “repressor domains,” or “epigenetic repressor domains.” Non-limiting examples of chemical modifications that may be mediated by effector domains include methylation, demethylation, acetylation, deacetylation, phosphorylation, SUMOylation and/or ubiquitination of DNA or histone residues.

[0128] In some embodiments, an effector domain of an epigenetic editor described herein may make histone tail modifications, e.g., by adding or removing active marks on histone tails.

[0129] In some embodiments, an effector domain of an epigenetic editor described herein may comprise or recruit a transcription-related protein, e.g., a transcription repressor. The transcription-related protein may be endogenous or exogenous.

[0130] In some embodiments, an effector domain of an epigenetic editor described herein may, for example, comprise a protein that directly or indirectly blocks access of a transcription factor to the gene of interest harboring the target sequence.

[0131] An effector domain may be a full-length protein or a fragment thereof that retains the epigenetic effector function (a “functional domain”). Functional domains that are capable of modulating (e.g., repressing) gene expression can be derived from a larger protein. For example, functional domains that can reduce target gene expression may be identified based on sequences of repressor proteins. Amino acid sequences of gene expression-modulating proteins may be obtained from available genome browsers, such as the UCSD genome browser or Ensembl genome browser. Protein annotation databases such as UniProt or Pfam can be used to identify functional domains within the full protein sequence. As a starting point, the largest sequence, encompassing all regions identified by different databases, may be tested for gene expression modulation activity. Various truncations then may be tested to identify the minimal functional unit.

[0132] Variants of effector domains described herein are also contemplated by the present disclosure. A variant may, for example, refer to a polypeptide with at least about 85%, 90%, 91%, 92%, 93%, 94%, 95%, 96%, 97%, 98%, 99%, or 100% sequence identity and/or sequence similarity to a wildtype effector domain described herein. In particular embodiments, the variant retains at least about 85%, 90%, 91%, 92%, 93%, 94%, 95%, 96%, 97%, 98%, 99%, or 100% of the epigenetic effector function of the wildtype effector domain.

[0133] In some embodiments, an effector domain described herein may comprise a fusion of two or more effector domains (e.g., KOX1 KRAB and ZIM3). The effector domain may, for example, comprise a fusion of 2, 3, 4, 5, 6, 7, 8, 9, or 10 effector domains, such as effector domains described herein. In certain embodiments, an effector domain comprises a fusion of a truncated form of an effector domain and a second effector domain. In certain embodiments, an effector domain comprises a fusion of the truncated forms of two effector domains (e.g., fusions of the N- and C-terminal portions of the two effector domains).

[0134] In some embodiments, an epigenetic editor described herein may comprise 1 effector domain, 2 effector domains, 3 effector domains, 4 effector domains, 5 effector domains, 6 effector domains, 7 effector domains, 8 effector domains, 9 effector domains, 10 effector domains, or more. In certain embodiments, the epigenetic editor comprises one or more fusion proteins (e.g., one, two, or three fusion proteins), each with one or more effector domains (e.g., one, two, or three effector domains) linked to a DNA-binding domain. In some embodiments, the effector domains may induce a combination of epigenetic modifications, e.g., transcription repression and DNA methylation, DNA methylation and histone deacetylation, DNA methylation and histone demethylation, DNA methylation and histone methylation, DNA methylation and histone phosphorylation, DNA methylation and histone ubiquitylation, DNA methylation, and histone SUMOylation.

[0135] In certain embodiments, an effector domain described herein (e.g., DNMT3A and/or DNMT3L) is encoded by a nucleotide sequence as found in the native genome (e.g., human or murine) for that effector domain. In other embodiments, an effector domain described herein is encoded by a nucleotide sequence that has been codon-optimized for optimal expression in human cells.

[0136] Effector domains described herein may include, for example, transcriptional repressors, DNA methyltransferases, and/or histone modifiers, as further detailed below.

### A. Transcriptional Repressors

[0137] In some embodiments, an epigenetic effector domain described herein mediates repression of a target gene's expression (e.g., transcription). The effector domain may comprise, e.g., a Krüppel-associated box (KRAB) repressor domain, a Repressor Element Silencing Transcription Factor (REST) repressor domain, a KRAB-associated protein 1 (KAP1) domain, a MAD domain, a FKHR (forkhead in rhabdosarcoma gene) repressor domain, an EGR-1 (early growth response gene product-1) repressor domain, an ets2 repressor factor repressor domain (ERD), a MAD smSIN3 interaction domain (SID), a WRPW motif of the hairy-related basic helix-loop-helix (bHLH) repressor proteins, an HP1 alpha chromo-shadow repressor domain, an HP1 beta repressor domain, or any combination thereof. The effector domain may recruit one or more protein domains that repress expression of the target gene, e.g., through a scaffold protein. In some embodiments, the effector domain may recruit or interact with a scaffold protein domain that recruits a PRMT protein, a HDAC protein, a SETDB1 protein, or a NuRD protein domain.

[0138] In some embodiments, the effector domain comprises a functional domain derived from a zinc finger repressor protein, such as a KRAB domain. KRAB domains are found in approximately 400 human ZFP-based transcription factors. Descriptions of KRAB domains may be found, for example, in Ecco et al., Development (2017) 144 (15): 2719-29 and Lambert et al., Cell (2018) 172:650-65.

[0139] In certain embodiments, the effector domain comprises a repressor domain (e.g., KRAB) derived from KOX1/ZNF10, KOX8/ZNF708, ZNF43, ZNF184, ZNF91, HPF4, HTF10, or HTF34. In some embodiments, the effector domain comprises a repressor domain (e.g., KRAB) derived from ZIM3, ZNF436, ZNF257, ZNF675, ZNF490, ZNF320, ZNF331, ZNF816, ZNF680, ZNF41, ZNF189, ZNF528, ZNF543, ZNF554, ZNF140, ZNF610, ZNF264, ZNF350, ZNF8, ZNF582, ZNF30, ZNF324, ZNF98, ZNF669, ZNF677, ZNF596, ZNF214, ZNF37, ZNF34, ZNF250, ZNF547, ZNF273, ZNF354, ZFP82, ZNF224, ZNF33, ZNF45, ZNF175, ZNF595, ZNF184, ZNF419, ZFP28-1, ZFP28-2, ZNF18, ZNF213, ZNF394, ZFP1, ZFP14, ZNF416, ZNF557, ZNF566, ZNF729, ZIM2, ZNF254, ZNF764, ZNF785, or any combination thereof. For example, the repressor domain may be a KRAB domain derived from KOX1, ZIM3, ZFP28, or ZN627. In particular embodiments, the repressor domain is a ZIM3 KRAB domain. In further embodiments, the effector domain is derived from a human protein, e.g., a human ZIM3, a human KOX1, a human ZFP28, or a human ZN627.

[0140] Sequences of exemplary effector domains that may reduce or silence target gene expression, or protein sequences that contain them, are provided in Table 5 below (SEQ indicates SEQ ID NO). Further examples of repressors and transcriptional repressor domains can be found, e.g., in PCT Patent Publication WO 2021/226077 and Tycko et al., Cell (2020) 183 (7): 2020-35, each of which is incorporated herein by reference in its entirety.

TABLE 5
Exemplary Effector Domains That May
Reduce or Silence Gene Expression

| Protein | SEQ |
|---|---|
| ZIM3 | 33 |
| ZNF436 | 34 |
| ZNF257 | 35 |
| ZNF675 | 36 |
| ZNF490 | 37 |
| ZNF320 | 38 |
| ZNF331 | 39 |
| ZNF816 | 40 |
| ZNF680 | 41 |
| ZNF41 | 42 |
| ZNF189 | 43 |
| ZNF528 | 44 |
| ZNF543 | 45 |
| ZNF554 | 46 |
| ZNF140 | 47 |
| ZNF610 | 48 |
| ZNF264 | 49 |
| ZNF350 | 50 |
| ZNF8 | 51 |
| ZNF582 | 52 |
| ZNF30 | 53 |
| ZNF324 | 54 |
| ZNF98 | 55 |
| ZNF669 | 56 |
| ZNF677 | 57 |
| ZNF596 | 58 |
| ZNF214 | 59 |
| ZNF37A | 60 |
| ZNF34 | 61 |
| ZNF250 | 62 |
| ZNF547 | 63 |
| ZNF273 | 64 |
| ZNF354A | 65 |
| ZFP82 | 66 |
| ZNF224 | 67 |
| ZNF33A | 68 |
| ZNF45 | 69 |
| ZNF175 | 70 |
| ZNF595 | 71 |
| ZNF184 | 72 |
| ZNF419 | 73 |
| ZFP28-1 | 74 |
| ZFP28-2 | 75 |
| ZNF18 | 76 |
| ZNF213 | 77 |
| ZNF394 | 78 |
| ZFP1 | 79 |
| ZFP14 | 80 |
| ZNF416 | 81 |
| ZNF557 | 82 |
| ZNF566 | 83 |
| ZNF729 | 84 |
| ZIM2 | 85 |
| ZNF254 | 86 |
| ZNF764 | 87 |
| ZNF785 | 88 |
| ZNF10 (KOX1) | 89 |
| CBX5 (chromoshadow domain) | 90 |
| RYBP (YAF2_RYBP | 91 |
| component of PRC1) | |
| YAF2 (YAF2_RYBP | 92 |
| component of PRC1) | |
| MGA (component of PRC1.6) | 93 |
| CBX1 (chromoshadow) | 94 |
| SCMH1 (SAM_1/SPM) | 95 |
| MPP8 (Chromodomain) | 96 |
| SUMO3 (Rad60-SLD) | 97 |
| HERC2 (Cyt-b5) | 98 |
| BIN1 (SH3_9) | 99 |
| PCGF2 (RING finger protein | 100 |
| domain) | |
| TOX (HMG box) | 101 |
| FOXA1 (HNF3A C-terminal | 102 |
| domain) | |
| FOXA2 (HNF3B C-terminal | 103 |
| domain) | |
| IRF2BP1 (IRF-2BP1_2 N- | 104 |
| terminal domain) | |
| IRF2BP2 (IRF-2BP1_2 N- | 105 |
| terminal domain) | |
| IRF2BPL IRF-2BP1_2 N- | 106 |
| terminal domain | |
| HOXA13 (homeodomain) | 107 |
| HOXB13 (homeodomain) | 108 |
| HOXC13 (homeodomain) | 109 |
| HOXA11 (homeodomain) | 110 |
| HOXC11 (homeodomain) | 111 |
| HOXC10 (homeodomain) | 112 |
| HOXA10 (homeodomain) | 113 |
| HOXB9 (homeodomain) | 114 |
| HOXA9 (homeodomain) | 115 |
| ZFP28_HUMAN | 116 |
| ZN334_HUMAN | 117 |
| ZN568_HUMAN | 118 |
| ZN37A_HUMAN | 119 |
| ZN181_HUMAN | 120 |
| ZN510_HUMAN | 121 |
| ZN862_HUMAN | 122 |
| ZN140_HUMAN | 123 |
| ZN208_HUMAN | 124 |
| ZN248_HUMAN | 125 |
| ZN571_HUMAN | 126 |
| ZN699_HUMAN | 127 |
| ZN726_HUMAN | 128 |
| ZIK1_HUMAN | 129 |
| ZNF2_HUMAN | 130 |
| Z705F_HUMAN | 131 |
| ZNF14_HUMAN | 132 |
| ZN471_HUMAN | 133 |
| ZN624_HUMAN | 134 |
| ZNF84_HUMAN | 135 |
| ZNF7_HUMAN | 136 |
| ZN891_HUMAN | 137 |
| ZN337_HUMAN | 138 |
| Z705G_HUMAN | 139 |
| ZN529_HUMAN | 140 |
| ZN729_HUMAN | 141 |
| ZN419_HUMAN | 142 |
| Z705A_HUMAN | 143 |
| ZNF45_HUMAN | 144 |
| ZN302_HUMAN | 145 |
| ZN486_HUMAN | 146 |
| ZN621_HUMAN | 147 |
| ZN688_HUMAN | 148 |
| ZN33A_HUMAN | 149 |
| ZN554_HUMAN | 150 |
| ZN878_HUMAN | 151 |
| ZN772_HUMAN | 152 |
| ZN224_HUMAN | 153 |
| ZN184_HUMAN | 154 |
| ZN544_HUMAN | 155 |
| ZNF57_HUMAN | 156 |
| ZN283_HUMAN | 157 |
| ZN549_HUMAN | 158 |
| ZN211_HUMAN | 159 |
| ZN615_HUMAN | 160 |
| ZN253_HUMAN | 161 |
| ZN226_HUMAN | 162 |
| ZN730_HUMAN | 163 |
| Z585A_HUMAN | 164 |
| ZN732_HUMAN | 165 |
| ZN681_HUMAN | 166 |
| ZN667_HUMAN | 167 |
| ZN649_HUMAN | 168 |
| ZN470_HUMAN | 169 |
| ZN484_HUMAN | 170 |
| ZN431_HUMAN | 171 |
| ZN382_HUMAN | 172 |
| ZN254_HUMAN | 173 |
| ZN124_HUMAN | 174 |
| ZN607_HUMAN | 175 |
| ZN317_HUMAN | 176 |
| ZN620_HUMAN | 177 |
| ZN141_HUMAN | 178 |
| ZN584_HUMAN | 179 |
| ZN540_HUMAN | 180 |
| ZN75D_HUMAN | 181 |
| ZN555_HUMAN | 182 |
| ZN658_HUMAN | 183 |
| ZN684_HUMAN | 184 |
| RBAK_HUMAN | 185 |
| ZN829_HUMAN | 186 |
| ZN582_HUMAN | 187 |
| ZN112_HUMAN | 188 |
| ZN716_HUMAN | 189 |
| HKR1_HUMAN | 190 |
| ZN350_HUMAN | 191 |
| ZN480_HUMAN | 192 |
| ZN416_HUMAN | 193 |
| ZNF92_HUMAN | 194 |
| ZN100_HUMAN | 195 |
| ZN736_HUMAN | 196 |
| ZNF74_HUMAN | 197 |
| CBX1_HUMAN | 198 |
| ZN443_HUMAN | 199 |
| ZN195_HUMAN | 200 |
| ZN530_HUMAN | 201 |
| ZN782_HUMAN | 202 |
| ZN791_HUMAN | 203 |
| ZN331_HUMAN | 204 |
| Z354C_HUMAN | 205 |
| ZN157_HUMAN | 206 |
| ZN727_HUMAN | 207 |
| ZN550_HUMAN | 208 |
| ZN793_HUMAN | 209 |
| ZN235_HUMAN | 210 |
| ZNF8_HUMAN | 211 |
| ZN724_HUMAN | 212 |
| ZN573_HUMAN | 213 |
| ZN577_HUMAN | 214 |
| ZN789_HUMAN | 215 |
| ZN718_HUMAN | 216 |
| ZN300_HUMAN | 217 |
| ZN383_HUMAN | 218 |
| ZN429_HUMAN | 219 |
| ZN677_HUMAN | 220 |
| ZN850_HUMAN | 221 |
| ZN454_HUMAN | 222 |
| ZN257_HUMAN | 223 |
| ZN264_HUMAN | 224 |
| ZFP82_HUMAN | 225 |
| ZFP14_HUMAN | 226 |
| ZN485_HUMAN | 227 |
| ZN737_HUMAN | 228 |
| ZNF44_HUMAN | 229 |
| ZN596_HUMAN | 230 |
| ZN565_HUMAN | 231 |
| ZN543_HUMAN | 232 |
| ZFP69_HUMAN | 233 |
| SUMO1_HUMAN | 234 |
| ZNF12_HUMAN | 235 |
| ZN169_HUMAN | 236 |
| ZN433_HUMAN | 237 |
| SUMO3_HUMAN | 238 |
| ZNF98_HUMAN | 239 |
| ZN175_HUMAN | 240 |
| ZN347_HUMAN | 241 |
| ZNF25_HUMAN | 242 |
| ZN519_HUMAN | 243 |
| Z585B_HUMAN | 244 |
| ZIM3_HUMAN | 245 |
| ZN517_HUMAN | 246 |
| ZN846_HUMAN | 247 |
| ZN230_HUMAN | 248 |
| ZNF66_HUMAN | 249 |
| ZFP1_HUMAN | 250 |
| ZN713_HUMAN | 251 |
| ZN816_HUMAN | 252 |
| ZN426_HUMAN | 253 |
| ZN674_HUMAN | 254 |
| ZN627_HUMAN | 255 |
| ZNF20_HUMAN | 256 |
| Z587B_HUMAN | 257 |
| ZN316_HUMAN | 258 |
| ZN233_HUMAN | 259 |
| ZN611_HUMAN | 260 |
| ZN556_HUMAN | 261 |
| ZN234_HUMAN | 262 |
| ZN560_HUMAN | 263 |
| ZNF77_HUMAN | 264 |
| ZN682_HUMAN | 265 |
| ZN614_HUMAN | 266 |
| ZN785_HUMAN | 267 |
| ZN445_HUMAN | 268 |
| ZFP30_HUMAN | 269 |
| ZN225_HUMAN | 270 |
| ZN551_HUMAN | 271 |
| ZN610_HUMAN | 272 |
| ZN528_HUMAN | 273 |
| ZN284_HUMAN | 274 |
| ZN418_HUMAN | 275 |
| MPP8_HUMAN | 276 |
| ZN490_HUMAN | 277 |
| ZN805_HUMAN | 278 |
| Z780B_HUMAN | 279 |
| ZN763_HUMAN | 280 |
| ZN285_HUMAN | 281 |
| ZNF85_HUMAN | 282 |
| ZN223_HUMAN | 283 |
| ZNF90_HUMAN | 284 |
| ZN557_HUMAN | 285 |
| ZN425_HUMAN | 286 |
| ZN229_HUMAN | 287 |
| ZN606_HUMAN | 288 |
| ZN155_HUMAN | 289 |
| ZN222_HUMAN | 290 |
| ZN442_HUMAN | 291 |
| ZNF91_HUMAN | 292 |
| ZN135_HUMAN | 293 |
| ZN778_HUMAN | 294 |
| RYBP_HUMAN | 295 |
| ZN534_HUMAN | 296 |
| ZN586_HUMAN | 297 |
| ZN567_HUMAN | 298 |
| ZN440_HUMAN | 299 |
| ZN583_HUMAN | 300 |
| ZN441_HUMAN | 301 |
| ZNF43_HUMAN | 302 |
| CBX5_HUMAN | 303 |
| ZN589_HUMAN | 304 |
| ZNF10_HUMAN | 305 |
| ZN563_HUMAN | 306 |
| ZN561_HUMAN | 307 |
| ZN136_HUMAN | 308 |
| ZN630_HUMAN | 309 |
| ZN527_HUMAN | 310 |
| ZN333_HUMAN | 311 |
| Z324B_HUMAN | 312 |
| ZN786_HUMAN | 313 |
| ZN709_HUMAN | 314 |
| ZN792_HUMAN | 315 |
| ZN599_HUMAN | 316 |
| ZN613_HUMAN | 317 |
| ZF69B_HUMAN | 318 |
| ZN799_HUMAN | 319 |
| ZN569_HUMAN | 320 |
| ZN564_HUMAN | 321 |
| ZN546_HUMAN | 322 |
| ZFP92_HUMAN | 323 |
| YAF2_HUMAN | 324 |
| ZN723_HUMAN | 325 |
| ZNF34_HUMAN | 326 |
| ZN439_HUMAN | 327 |
| ZFP57_HUMAN | 328 |
| ZNF19_HUMAN | 329 |
| ZN404_HUMAN | 330 |
| ZN274_HUMAN | 331 |
| CBX3_HUMAN | 332 |
| ZNF30_HUMAN | 333 |
| ZN250_HUMAN | 334 |
| ZN570_HUMAN | 335 |
| ZN675_HUMAN | 336 |
| ZN695_HUMAN | 337 |
| ZN548_HUMAN | 338 |
| ZN132_HUMAN | 339 |
| ZN738_HUMAN | 340 |
| ZN420_HUMAN | 341 |
| ZN626_HUMAN | 342 |
| ZN559_HUMAN | 343 |
| ZN460_HUMAN | 344 |
| ZN268_HUMAN | 345 |
| ZN304_HUMAN | 346 |
| ZIM2_HUMAN | 347 |
| ZN605_HUMAN | 348 |
| ZN844_HUMAN | 349 |
| SUMO5_HUMAN | 350 |
| ZN101_HUMAN | 351 |
| ZN783_HUMAN | 352 |
| ZN417_HUMAN | 353 |
| ZN182_HUMAN | 354 |
| ZN823_HUMAN | 355 |
| ZN177_HUMAN | 356 |
| ZN197_HUMAN | 357 |
| ZN717_HUMAN | 358 |
| ZN669_HUMAN | 359 |
| ZN256_HUMAN | 360 |
| ZN251_HUMAN | 361 |
| CBX4_HUMAN | 362 |
| PCGF2_HUMAN | 363 |
| CDY2_HUMAN | 364 |
| CDYL2_HUMAN | 365 |
| HERC2_HUMAN | 366 |
| ZN562_HUMAN | 367 |
| ZN461_HUMAN | 368 |
| Z324A_HUMAN | 369 |
| ZN766_HUMAN | 370 |
| ID2_HUMAN | 371 |
| TOX_HUMAN | 372 |
| ZN274_HUMAN | 373 |
| SCMH1_HUMAN | 374 |
| ZN214_HUMAN | 375 |
| CBX7_HUMAN | 376 |
| ID1_HUMAN | 377 |
| CREM_HUMAN | 378 |
| SCX_HUMAN | 379 |
| ASCL1_HUMAN | 380 |
| ZN764_HUMAN | 381 |
| SCML2_HUMAN | 382 |
| TWST1_HUMAN | 383 |
| CREB1_HUMAN | 384 |
| TERF1_HUMAN | 385 |
| ID3_HUMAN | 386 |
| CBX8_HUMAN | 387 |
| CBX4_HUMAN | 388 |
| GSX1_HUMAN | 389 |
| NKX22_HUMAN | 390 |
| ATF1_HUMAN | 391 |
| TWST2_HUMAN | 392 |
| ZNF17_HUMAN | 393 |
| TOX3_HUMAN | 394 |
| TOX4_HUMAN | 395 |
| ZMYM3_HUMAN | 396 |
| I2BP1_HUMAN | 397 |
| RHXF1_HUMAN | 398 |
| SSX2_HUMAN | 399 |
| I2BPL_HUMAN | 400 |
| ZN680_HUMAN | 401 |
| CBX1_HUMAN | 402 |
| TRI68_HUMAN | 403 |
| HXA13_HUMAN | 404 |
| PHC3_HUMAN | 405 |
| TCF24_HUMAN | 406 |
| CBX3_HUMAN | 407 |
| HXB13_HUMAN | 408 |
| HEY1_HUMAN | 409 |
| PHC2_HUMAN | 410 |
| ZNF81_HUMAN | 411 |
| FIGLA_HUMAN | 412 |
| SAM11_HUMAN | 413 |
| KMT2B_HUMAN | 414 |
| HEY2_HUMAN | 415 |
| JDP2_HUMAN | 416 |
| HXC13_HUMAN | 417 |
| ASCL4_HUMAN | 418 |
| HHEX_HUMAN | 419 |
| HERC2_HUMAN | 420 |
| GSX2_HUMAN | 421 |
| BIN1_HUMAN | 422 |
| ETV7_HUMAN | 423 |
| ASCL3_HUMAN | 424 |
| PHC1_HUMAN | 425 |
| OTP_HUMAN | 426 |
| I2BP2_HUMAN | 427 |
| VGLL2_HUMAN | 428 |
| HXA11_HUMAN | 429 |
| PDLI4_HUMAN | 430 |
| ASCL2_HUMAN | 431 |
| CDX4_HUMAN | 432 |
| ZN860_HUMAN | 433 |
| LMBL4_HUMAN | 434 |
| PDIP3_HUMAN | 435 |
| NKX25_HUMAN | 436 |
| CEBPB_HUMAN | 437 |
| ISL1_HUMAN | 438 |
| CDX2_HUMAN | 439 |
| PROP1_HUMAN | 440 |
| SIN3B_HUMAN | 441 |
| SMBT1_HUMAN | 442 |
| HXC11_HUMAN | 443 |
| HXC10_HUMAN | 444 |
| PRS6A_HUMAN | 445 |
| VSX1_HUMAN | 446 |
| NKX23_HUMAN | 447 |
| MTG16_HUMAN | 448 |
| HMX3_HUMAN | 449 |
| HMX1_HUMAN | 450 |
| KIF22_HUMAN | 451 |
| CSTF2_HUMAN | 452 |
| CEBPE_HUMAN | 453 |
| DLX2_HUMAN | 454 |
| ZMYM3_HUMAN | 455 |
| PPARG_HUMAN | 456 |
| PRIC1_HUMAN | 457 |
| UNC4_HUMAN | 458 |
| BARX2_HUMAN | 459 |
| ALX3_HUMAN | 460 |
| TCF15_HUMAN | 461 |
| TERA_HUMAN | 462 |
| VSX2_HUMAN | 463 |
| HXD12_HUMAN | 464 |
| CDX1_HUMAN | 465 |
| TCF23_HUMAN | 466 |
| ALX1_HUMAN | 467 |
| HXA10_HUMAN | 468 |
| RX_HUMAN | 469 |
| CXXC5_HUMAN | 470 |
| SCML1_HUMAN | 471 |
| NFIL3_HUMAN | 472 |
| DLX6_HUMAN | 473 |
| MTG8_HUMAN | 474 |
| CBX8_HUMAN | 475 |
| CEBPD_HUMAN | 476 |
| SEC13_HUMAN | 477 |
| FIP1_HUMAN | 478 |
| ALX4_HUMAN | 479 |
| LHX3_HUMAN | 480 |
| PRIC2_HUMAN | 481 |
| MAGI3_HUMAN | 482 |
| NELL1_HUMAN | 483 |
| PRRX1_HUMAN | 484 |
| MTG8R_HUMAN | 485 |
| RAX2_HUMAN | 486 |
| DLX3_HUMAN | 487 |
| DLX1_HUMAN | 488 |
| NKX26_HUMAN | 489 |
| NAB1_HUMAN | 490 |
| SAMD7_HUMAN | 491 |
| PITX3_HUMAN | 492 |
| WDR5_HUMAN | 493 |
| MEOX2_HUMAN | 494 |
| NAB2_HUMAN | 495 |
| DHX8_HUMAN | 496 |
| FOXA2_HUMAN | 497 |
| CBX6_HUMAN | 498 |
| EMX2_HUMAN | 499 |
| CPSF6_HUMAN | 500 |
| HXC12_HUMAN | 501 |
| KDM4B_HUMAN | 502 |
| LMBL3_HUMAN | 503 |
| PHX2A_HUMAN | 504 |
| EMX1_HUMAN | 505 |
| NC2B_HUMAN | 506 |
| DLX4_HUMAN | 507 |
| SRY_HUMAN | 508 |
| ZN777_HUMAN | 509 |
| NELL1_HUMAN | 510 |
| ZN398_HUMAN | 511 |
| GATA3_HUMAN | 512 |
| BSH_HUMAN | 513 |
| SF3B4_HUMAN | 514 |
| TEAD1_HUMAN | 515 |
| TEAD3_HUMAN | 516 |
| RGAP1_HUMAN | 517 |
| PHF1_HUMAN | 518 |
| FOXA1_HUMAN | 519 |
| GATA2_HUMAN | 520 |
| FOXO3_HUMAN | 521 |
| ZN212_HUMAN | 522 |
| IRX4_HUMAN | 523 |
| ZBED6_HUMAN | 524 |
| LHX4_HUMAN | 525 |
| SIN3A_HUMAN | 526 |
| RBBP7_HUMAN | 527 |
| NKX61_HUMAN | 528 |
| TRI68_HUMAN | 529 |
| R51A1_HUMAN | 530 |
| MB3L1_HUMAN | 531 |
| DLX5_HUMAN | 532 |
| NOTC1_HUMAN | 533 |
| TERF2_HUMAN | 534 |
| ZN282_HUMAN | 535 |
| RGS12_HUMAN | 536 |
| ZN840_HUMAN | 537 |
| SPI2B_HUMAN_1 | 538 |
| PAX7_HUMAN | 539 |
| NKX62_HUMAN | 540 |
| ASXL2_HUMAN | 541 |
| FOXO1_HUMAN | 542 |
| GATA3_HUMAN | 543 |
| GATA1_HUMAN | 544 |
| ZMYM5_HUMAN | 545 |
| ZN783_HUMAN | 546 |
| SPI2B_HUMAN_2 | 547 |
| LRP1_HUMAN | 548 |
| MIXL1_HUMAN | 549 |
| SGT1_HUMAN | 550 |
| LMCD1_HUMAN | 551 |
| CEBPA_HUMAN | 552 |
| GATA2_HUMAN | 553 |
| SOX14_HUMAN | 554 |
| WTIP_HUMAN | 555 |
| PRP19_HUMAN | 556 |
| CBX6_HUMAN | 557 |
| NKX11_HUMAN | 558 |
| RBBP4_HUMAN | 559 |
| DMRT2_HUMAN | 560 |
| SMCA2_HUMAN | 561 |
| ZNF10_HUMAN | 562 |
| EED_HUMAN | 563 |
| RCOR1_HUMAN | 564 |

[0141] A functional analog of any one of the above-listed proteins, i.e., a molecule having the same or substantially the same biological function (e.g., retaining 70% or more, 80% or more, 90% or more, 95% or more, or 98% or more) of the protein's transcription factor function) is encompassed by the present disclosure. For example, the functional analog may be an isoform or a variant of the above-listed protein, e.g., containing a portion of the above protein with or without additional amino acid residues and/or containing mutations relative to the above protein. In some embodiments, the functional analog has a sequence identity that is at least 75, 80, 85, 90, 95, 98, or 99% to one of the sequences listed in Table 5. Homologs, orthologs, and mutants of the above-listed proteins are also contemplated.

[0142] In certain embodiments, an epigenetic editor described herein comprises a KRAB domain derived from KOX1, ZIM3, ZFP28, or ZN627, and/or an effector domain derived from KAP1, MECP2, HP1a, HP1b, CBX8, CDYL2, TOX, TOX3, TOX4, EED, EZH2, RBBP4, RCOR1, or SCML2, optionally wherein the parental protein is a human protein. In particular embodiments, an epigenetic editor described herein comprises a domain derived from KOX1, ZIM3, ZFP28, and/or ZN627, optionally wherein the parental protein is a human protein. In certain embodiments, the epigenetic editor may comprise a KRAB domain derived from KOX1 (ZNF10), e.g., a human KOX1. In certain embodiments, the epigenetic editor may comprise a KRAB domain derived from ZIM3 (ZNF657 or ZNF264), e.g., a human ZIM3. In certain embodiments, the epigenetic editor may comprise a KRAB domain derived from ZFP28, e.g., a human ZFP28. In certain embodiments, the epigenetic editor may comprise a KRAB domain derived from ZN627, e.g., a human ZN627. In certain embodiments, an epigenetic editor described herein may comprise a CDYL2, e.g., a human CDYL2, and/or a TOX domain (e.g., a human TOX domain) in combination with a KOX1 KRAB domain (e.g., a human KOX1 KRAB domain).

[0143] In certain embodiments, an epigenetic effector described herein comprises a repressor domain derived from KOX1/ZNF10 (SEQ ID NO: 89). For example, the repressor domain may comprise the sequence of SEQ ID NO: 89, or a sequence at least 75%, 80%, 85%, 90%, 91%, 92%, 93%, 94%, 95%, 96%, 97%, 98%, or 99% identical to SEQ ID NO: 89.

[0144] In certain embodiments, an epigenetic effector described herein comprises a repressor domain derived from KOX1/ZNF10, as shown in Table 6 below:

TABLE 6
Exemplary Effector Domains Derived from KOX1/ZNF10

| Protein | Protein Sequence |
|---|---|
| KOX1/ZNF10 KRAB 1 | SEQ ID NO: 565 |
| KOX1/ZNF10 KRAB 2 | SEQ ID NO: 566 |
| KOX1/ZNF10 KRAB 3 | SEQ ID NO: 567 |
| KOX1/ZNF10 (aa 11-72) | SEQ ID NO: 568 |
| KOX1/ZNF10 (aa 11-108) | SEQ ID NO: 569 |
| KOX1/ZNF10 variant | SEQ ID NO: 570 |
| KOX1 KRAB-ZIM3 chimera | SEQ ID NO: 571 |
| ZIM3-KOX1 KRAB chimera | SEQ ID NO: 572 |

[0145] In particular embodiments, the repressor domain may comprise the amino acid sequence of SEQ ID NO: 565, or a sequence at least 75%, 80%, 85%, 90%, 91%, 92%, 93%, 94%, 95%, 96%, 97%, 98%, or 99% identical to SEQ ID NO: 565.

[0146] In particular embodiments, the repressor domain may comprise the amino acid sequence of SEQ ID NO: 566, or a sequence at least 75%, 80%, 85%, 90%, 91%, 92%, 93%, 94%, 95%, 96%, 97%, 98%, or 99% identical to SEQ ID NO: 566.

[0147] In particular embodiments, the repressor domain may comprise the amino acid sequence of SEQ ID NO: 567, or a sequence at least 75%, 80%, 85%, 90%, 91%, 92%, 93%, 94%, 95%, 96%, 97%, 98%, or 99% identical to SEQ ID NO: 567.

[0148] In particular embodiments, the repressor domain may comprise the amino acid sequence of SEQ ID NO: 568, or a sequence at least 75%, 80%, 85%, 90%, 91%, 92%, 93%, 94%, 95%, 96%, 97%, 98%, or 99% identical to SEQ ID NO: 568.

[0149] In particular embodiments, the repressor domain may comprise the amino acid sequence of SEQ ID NO: 569, or a sequence at least 75%, 80%, 85%, 90%, 91%, 92%, 93%, 94%, 95%, 96%, 97%, 98%, or 99% identical to SEQ ID NO: 569.

[0150] In particular embodiments, the repressor domain may comprise the amino acid sequence of SEQ ID NO: 570, or a sequence at least 75%, 80%, 85%, 90%, 91%, 92%, 93%, 94%, 95%, 96%, 97%, 98%, or 99% identical to SEQ ID NO: 570.

[0151] In particular embodiments, the repressor domain may comprise the amino acid sequence of SEQ ID NO: 571, or a sequence at least 75%, 80%, 85%, 90%, 91%, 92%, 93%, 94%, 95%, 96%, 97%, 98%, or 99% identical to SEQ ID NO: 571.

[0152] In particular embodiments, the repressor domain may comprise the amino acid sequence of SEQ ID NO: 572, or a sequence at least 75%, 80%, 85%, 90%, 91%, 92%, 93%, 94%, 95%, 96%, 97%, 98%, or 99% identical to SEQ ID NO: 572.

### B. DNA Methyltransferases

[0153] In some embodiments, an effector domain of an epigenetic editor described herein alters target gene expression through DNA modification, such as methylation. Highly methylated areas of DNA tend to be less transcriptionally active than less methylated areas. DNA methylation occurs primarily at CpG sites (shorthand for “C-phosphate-G-” or “cytosine-phosphate-guanine” sites). Many mammalian genes have promoter regions near or including CpG islands (nucleic acid regions with a high frequency of CpG dinucleotides).

[0154] An effector domain described herein may be, e.g., a DNA methyltransferase (DNMT) or a catalytic domain thereof, or may be capable of recruiting a DNA methyltransferase. DNMTs encompass enzymes that catalyze the transfer of a methyl group to a DNA nucleotide, such as canonical cytosine-5 DNMTs that catalyze the addition of methyl groups to genomic DNA (e.g., DNMT1, DNMT3A, DNMT3B, and DNMT3C). This term also encompasses non-canonical family members that do not catalyze methylation themselves but that recruit (including activate) catalytically active DNMTs; a non-limiting example of such a DNMT is DNMT3L. See, e.g., Lyko, Nat Review (2018) 19:81-92. Unless otherwise indicated, a DNMT domain may refer to a polypeptide domain derived from a catalytically active DNMT (e.g., DNMT1, DNMT3A, and DNMT3B) or from a catalytically inactive DNMT (e.g., DNMT3L). A DNMT may repress expression of the target gene through the recruitment of repressive regulatory proteins. In some embodiments, the methylation is at a CG (or CpG) dinucleotide sequence. In some embodiments, the methylation is at a CHG or CHH sequence, where H is any one of A, T, or C.

[0155] In some embodiments, a DNMT described herein can be an animal DNMT (e.g., a mammalian DNMT), a plant DNMT, a fungal DNMT, or a bacterial DNMT. A bacterial DNMT can be obtained from a bacterial species (e.g., a coccus bacterium, bacillus bacterium, spiral bacterium, or an intracellular, gram-positive, or gram-negative bacterium. In certain embodiments, the bacterial species is Mycoplasmatales bacterium, Mycoplasma marinum, or Spiroplasma chinense. In certain embodiments, the bacterial species is not M. penetrans, S. monbiae, H. parainfluenzae, A. luteus, H. aegyptius, H. haemolyticus, Moraxella, E. coli, T. aquaticus, C. crescentus, or C. difficile. In certain embodiments, an epigenetic editor described herein comprises a DNMT domain comprising SEQ ID NO: 601, or a sequence at least 75%, 80%, 85%, 90%, 91%, 92%, 93%, 94%, 95%, 96%, 97%, 98%, or 99% identical to SEQ ID NO: 601. In certain embodiments, an epigenetic editor described herein comprises a DNMT domain comprising SEQ ID NO: 602, or a sequence at least 75%, 80%, 85%, 90%, 91%, 92%, 93%, 94%, 95%, 96%, 97%, 98%, or 99% identical to SEQ ID NO: 602. In certain embodiments, an epigenetic editor described herein comprises a DNMT domain comprising SEQ ID NO: 603, or a sequence at least 75%, 80%, 85%, 90%, 91%, 92%, 93%, 94%, 95%, 96%, 97%, 98%, or 99% identical to SEQ ID NO: 603.

[0156] In certain embodiments, DNMTs in the epigenetic editors described herein may include, e.g., DNMT1, DNMT3A, DNMT3B, and/or DNMT3C. In some embodiments, the DNMT is a mammalian (e.g., human or murine) DNMT. In particular embodiments, the DNMT is DNMT3A (e.g., human DNMT3A). In certain embodiments, an epigenetic editor described herein comprises a DNMT3A domain comprising SEQ ID NO: 574, or a sequence at least 75%, 80%, 85%, 90%, 91%, 92%, 93%, 94%, 95%, 96%, 97%, 98%, or 99% identical to SEQ ID NO: 574. In certain embodiments, an epigenetic editor described herein comprises a DNMT3A domain comprising SEQ ID NO: 575, or a sequence at least 75%, 80%, 85%, 90%, 91%, 92%, 93%, 94%, 95%, 96%, 97%, 98%, or 99% identical to SEQ ID NO: 575. In some embodiments, the DNMT3A domain may have, e.g., a mutation at position H739 (such as H739A or H739E), R771 (such as R771L) and/or R836 (such as R836A or R836Q), or any combination thereof (numbering according to SEQ ID NO: 574).

[0157] In some embodiments, an effector domain described herein may be a DNMT-like domain. As used herein a “DNMT-like domain” is a regulatory factor of DNMT that may activate or recruit other DNMT domains, but does not itself possess methylation activity. In some embodiments, the DNMT-like domain is a mammalian (e.g., human or mouse) DNMT-like domain. In certain embodiments, the DNMT-like domain is DNMT3L, which may be, for example, human DNMT3L or mouse DNMT3L. In certain embodiments, an epigenetic editor described herein comprises a DNMT3L domain comprising SEQ ID NO: 578, or a sequence at least 75%, 80%, 85%, 90%, 91%, 92%, 93%, 94%, 95%, 96%, 97%, 98%, or 99% identical to SEQ ID NO: 578. In certain embodiments, an epigenetic editor herein comprises a DNMT3L domain comprising SEQ ID NO: 579, or a sequence at least 75%, 80%, 85%, 90%, 91%, 92%, 93%, 94%, 95%, 96%, 97%, 98%, or 99% identical to SEQ ID NO: 579. In certain embodiments, an epigenetic editor described herein comprises a DNMT3L domain comprising SEQ ID NO: 580, or a sequence at least 75%, 80%, 85%, 90%, 91%, 92%, 93%, 94%, 95%, 96%, 97%, 98%, or 99% identical to SEQ ID NO: 580. In certain embodiments, an epigenetic editor described herein comprises a DNMT3L domain comprising SEQ ID NO: 581, or a sequence at least 75%, 80%, 85%, 90%, 91%, 92%, 93%, 94%, 95%, 96%, 97%, 98%, or 99% identical to SEQ ID NO: 581. In some embodiments, the DNMT3L domain may have, e.g., a mutation corresponding to that at position D226 (such as D226V), Q268 (such as Q268K), or both (numbering according to SEQ ID NO: 578).

[0158] In certain embodiments, an epigenetic editor herein may comprise comprising both DNMT and DNMT-like effector domains. For example, the epigenetic editor may comprise a DNMT3A-3L domain, wherein DNMT3A and DNMT3L may be covalently linked. In other embodiments, an epigenetic editor described herein may comprise an effector domain that comprises only a DNMT3A domain (e.g., human DNMT3A), or only a DNMT-like domain (e.g., DNMT3L, which may be human or mouse DNMT3L).

[0159] Table 7 below provides exemplary DNMTs that may be part of an epigenetic effector described herein, or from which an effector domain of an epigenetic editor described herein may be derived.

TABLE 7
Exemplary DNMT Sequences

| Protein Name | Species | Target | Protein Sequence |
|---|---|---|---|
| DNMT1 | Human | 5mC | SEQ ID NO: 573 |
| DNMT3A (h3A) | Human | 5mC | SEQ ID NO: 574 |
| DNMT3A | Human | 5mC | SEQ ID NO: 575 |
| (catalytic domain) | | | |
| (h3As) | | | |
| DNMT3B | Human | 5mC | SEQ ID NO: 576 |
| DNMT3C | Mouse | 5mC | SEQ ID NO: 577 |
| DNMT3L (h3L) | Human | 5mC | SEQ ID NO: 578 |
| DNMT3L | Human | 5mC | SEQ ID NO: 579 |
| (catalytic domain) | | | |
| (h3Ls) | | | |
| DNMT3L (m3L) | Mouse | 5mC | SEQ ID NO: 580 |
| DNMT3L | Mouse | 5mC | SEQ ID NO: 581 |
| (catalytic domain) | | | |
| (m3Ls) | | | |
| DNMT3L | Ailuropoda melanoleuca | 5mC | SEQ ID NO: 582 |
| DNMT3L | Ailuropoda melanoleuca | 5mC | SEQ ID NO: 583 |
| (catalytic domain) | | | |
| DNMT3L | Carlito syrichta | 5mC | SEQ ID NO: 584 |
| DNMT3L | Carlito syrichta | 5mC | SEQ ID NO: 585 |
| (catalytic domain) | | | |
| DNMT3L | Meriones unguiculatus | 5mC | SEQ ID NO: 586 |
| DNMT3L | Meriones unguiculatus | 5mC | SEQ ID NO: 587 |
| (catalytic domain) | | | |
| DNMT3L | Ochotona princeps | 5mC | SEQ ID NO: 588 |
| DNMT3L | Ochotona princeps | 5mC | SEQ ID NO: 589 |
| (catalytic domain) | | | |
| DNMT3L | Neosciurus carolinensis | 5mC | SEQ ID NO: 590 |
| DNMT3L | Neosciurus carolinensis | 5mC | SEQ ID NO: 591 |
| (catalytic domain) | | | |
| DNMT3L | Bison bison | 5mC | SEQ ID NO: 592 |
| DNMT3L | Bison bison | 5mC | SEQ ID NO: 593 |
| (catalytic domain) | | | |
| DNMT3L | Equus przewalskii | 5mC | SEQ ID NO: 594 |
| DNMT3L | Equus przewalskii | 5mC | SEQ ID NO: 595 |
| (catalytic domain) | | | |
| DNMT3L | Mus caroli | 5mC | SEQ ID NO: 596 |
| DNMT3L | Mus caroli | 5mC | SEQ ID NO: 597 |
| (catalytic domain) | | | |
| DNMT3L | Pan troglodytes | 5mC | SEQ ID NO: 598 |
| DNMT3L | Pan troglodytes | 5mC | SEQ ID NO: 599 |
| (catalytic domain) | | | |
| TRDMT1 | Human | tRNA 5mC | SEQ ID NO: 600 |
| (DNMT2) | | | |
| DNA cytosine | Mycoplasmatales | 5mC | SEQ ID NO: 601 |
| methyltransferase | bacterium | | |
| DNA cytosine | Mycoplasma marinum | 5mC | SEQ ID NO: 602 |
| methyltransferase | | | |
| DNA (cytosine-5-)- | Spiroplasma chinense | 5mC | SEQ ID NO: 603 |
| methyltransferase | | | |
| M.MpeI | Mycoplasma penetrans | 5mC | SEQ ID NO: 604 |
| M.SssI | Spiroplasma monobiae | 5mC | SEQ ID NO: 605 |
| M.HpaII | Haemophilus | 5mC (CCGG) | SEQ ID NO: 606 |
| | parainfluenzae | | |
| M.AluI | Arthrobacter luteus | 5mC (AGCT) | SEQ ID NO: 607 |
| M.HaeIII | Haemophilus aegyptius | 5mC (GGCC) | SEQ ID NO: 608 |
| M.HhaI | Haemophilus | 5mC (GCGC) | SEQ ID NO: 609 |
| | haemolyticus | | |
| M.MspI | Moraxella | 5mC (CCGG) | SEQ ID NO: 610 |
| Masc1 | Ascobolus | 5mC | SEQ ID NO: 611 |
| MET1 | Arabidopsis | 5mC | SEQ ID NO: 612 |
| Masc2 | Ascobolus | 5mC | SEQ ID NO: 613 |
| Dim-2 | Neurospora | 5mC | SEQ ID NO: 614 |
| dDnmt2 | Drosophila | 5mC | SEQ ID NO: 615 |
| Pmt1 | S. pombe | 5mC | SEQ ID NO: 616 |
| DRM1 | Arabidopsis | 5mC | SEQ ID NO: 617 |
| DRM2 | Arabidopsis | 5mC | SEQ ID NO: 618 |
| CMT1 | Arabidopsis | 5mC | SEQ ID NO: 619 |
| CMT2 | Arabidopsis | 5mC | SEQ ID NO: 620 |
| CMT3 | Arabidopsis | 5mC | SEQ ID NO: 621 |
| Rid | Neurospora | 5mC | SEQ ID NO: 622 |
| hsdM gene | bacteria (E. coli, strain 12) | m6A | SEQ ID NO: 623 |
| hsdS gene | bacteria (E. coli, strain 12) | m6A | SEQ ID NO: 624 |
| M.TaqI | Bacteria (Thermus | m6A | SEQ ID NO: 625 |
| | aquaticus) | | |
| M.EcoDam | E. coli | m6A | SEQ ID NO: 626 |
| M.CcrMI | Caulobacter crescentus | m6A | SEQ ID NO: 627 |
| CamA | Clostridioides difficile | m6A | SEQ ID NO: 628 |

[0160] A functional analog of any one of the above-listed proteins, i.e., a molecule having the same or substantially the same biological function (e.g., retaining 70% or more, 80% or more, 90% or more, 95% or more, or 98% or more) of the protein's DNA methylation function or recruiting function) is encompassed by the present disclosure. For example, the functional analog may be an isoform or a variant of the above-listed protein, e.g., containing a portion of the above protein with or without additional amino acid residues and/or containing mutations relative to the above protein. In some embodiments, the functional analog has a sequence identity that is at least 75, 80, 85, 90, 95, 98, or 99% to one of the sequences listed in Table 7. In some embodiments, the effector domain herein comprises only the functional domain (or functional analog thereof), e.g., the catalytic domain or recruiting domain, of an above-listed protein. In some embodiments, the effector domain herein comprises one or more epigenetic effector domains selected from Table 7, or functional homologs, orthologs, or variants thereof.

[0161] As used herein, a DNMT domain (e.g., a DNMT3A domain or a DNMT3L domain) refers to a protein domain that is identical to the parental protein (e.g., a human or murine DNMT3A or DNMT3L) or a functional analog thereof (e.g., having a functional fragment, such as a catalytic fragment or recruiting fragment, of the parental protein; and/or having mutations that improve the activity of the DNMT protein).

[0162] An epigenetic editor herein may effect methylation at, e.g., 1, 2, 3, 4, 5, 6, 7, 8, 9, 10, 11, 12, 13, 14, 15, 16, 17, 18, 19, 20, 30, 40, 50, 60, 70, 80, 90, 100, 200, 300, 400, 500, 600, 700, 800, 900, or 1000 or more CpG dinucleotide sequences in the target gene or chromosome. The CpG dinucleotide sequences may be located within or near the target gene in CpG islands, or may be located in a region that is not a CpG island. A CpG island generally refers to a nucleic acid sequence or chromosome region that comprises a high frequency of CpG dinucleotides. For example, a CpG island may comprise at least 50% GC content. The CpG island may have a high observed-to-expected CpG ratio, for example, an observed-to-expected CpG ratio of at least 60%. As used herein, an observed-to-expected CpG ratio is determined by Number of CpG*(sequence length)/(Number of C*Number of G). In some embodiments, the CpG island has an observed-to-expected CpG ratio of at least 60%, 70%, 80%, 90% or more. A CpG island may be a sequence or region of, e.g., at least 200, 250, 300, 350, 400, 450, 500, 550, 600, 650, 700, 750, or 800 nucleotides. In some embodiments, only 1, or less than 2, 3, 4, 5, 6, 7, 8, 9, 10, 11, 12, 13, 14, 15, 16, 17, 18, 19, 20, 30, 40, or 50 CpG dinucleotides are methylated by the epigenetic editor.

[0163] In some embodiments, an epigenetic editor herein effects methylation at a hypomethylated nucleic acid sequence, i.e., a sequence that may lack methyl groups on the 5-methyl cytosine nucleotides (e.g., in CpG) as compared to a standard control. Hypomethylation may occur, for example, in aging cells or in cancer (e.g., early stages of neoplasia) relative to a younger cell or non-cancer cell, respectively.

[0164] In some embodiments, an epigenetic editor described herein induces methylation at a hypermethylated nucleic acid sequence.

[0165] In some embodiments, methylation may be introduced by the epigenetic editor at a site other than a CpG dinucleotide. For example, the target gene sequence may be methylated at the C nucleotide of CpA, CpT, or CpC sequences. In some embodiments, an epigenetic editor comprises a DNMT3A domain and effects methylation at CpG, CpA, CpT, CpC sequences, or any combination thereof. In some embodiments, an epigenetic editor comprises a DNMT3A domain that lacks a regulatory subdomain and only maintains a catalytic domain. In some embodiments, the epigenetic editor comprising a DNMT3A catalytic domain effects methylation exclusively at CpG sequences. In some embodiments, an epigenetic editor comprising a DNMT3A domain that comprises a mutation, e.g. a R836A or R836Q mutation (numbering according to SEQ ID NO: 574), has higher methylation activity at CpA, CpC, and/or CpT sequences as compared to an epigenetic editor comprising a wildtype DNMT3A domain.

### C. Histone Modifiers

[0166] In some embodiments, an effector domain of an epigenetic editor herein mediates histone modification. Histone modifications play a structural and biochemical role in gene transcription, such as by formation or disruption of the nucleosome structure that binds to the histone and prevents gene transcription. Histone modifications may include, for example, acetylation, deacetylation, methylation, phosphorylation, ubiquitination, SUMOylation and the like, e.g., at their N-terminal ends (“histone tails”). These modifications maintain or specifically convert chromatin structure, thereby controlling responses such as gene expression, DNA replication, DNA repair, and the like, which occur on chromosomal DNA. Post-translational modification of histones is an epigenetic regulatory mechanism and is considered essential for the genetic regulation of eukaryotic cells. Recent studies have revealed that chromatin remodeling factors such as SWI/SNF, RSC, NURF, NRD, and the like, which facilitate transcription factor access to DNA by modifying the nucleosome structure; histone acetyltransferases (HATs) that regulate the acetylation state of histones; and histone deacetylases (HDACs), act as important regulators.

[0167] In particular, the unstructured N-termini of histones may be modified by acetylation, deacetylation, methylation, ubiquitylation, phosphorylation, SUMOylation, ribosylation, citrullination O-GlcNAcylation, crotonylation, or any combination thereof. For example, histone acetyltransferases (HATs) utilize acetyl-CoA as a cofactor and catalyze the transfer of an acetyl group to the epsilon amino group of the lysine side chains. This neutralizes the lysine's positive charge and weakens the interactions between histones and DNA, thus opening the chromosomes for transcription factors to bind and initiate transcription. Acetylation of K14 and K9 lysines of histone H3 by histone acetyltransferase enzymes may be linked to transcriptional competence in humans. Lysine acetylation may directly or indirectly create binding sites for chromatin-modifying enzymes that regulate transcriptional activation. On the other hand, histone methylation of lysine 9 of histone H3 may be associated with heterochromatin, or transcriptionally silent chromatin.

[0168] In certain embodiments, an effector domain of an epigenetic editor described herein comprises a histone methyltransferase domain. The effector domain may comprise, for example, a DOTIL domain, a SET domain, a SUV39H1 domain, a G9a/EHMT2 protein domain, an EZH1 domain, an EZH2 domain, a SETDB1 domain, or any combination thereof. In particular embodiments, the effector domain comprises a histone-lysine-N-methyltransferase SETDB1 domain.

[0169] In some embodiments, the effector domain comprises a histone deacetylase protein domain. In certain embodiments, the effector domain comprises a HDAC family protein domain, for example, a HDAC1, HDAC3, HDAC5, HDAC7, or HDAC9 protein domain. In particular embodiments, the effector domain comprises a nucleosome remodeling and deacetylase complex (NURD), which removes acetyl groups from histones.

### D. Other Effector Domains

[0170] In some embodiments, the effector domain comprises a tripartite motif containing protein (TRIM28, TIF1-beta, or KAP1). In certain embodiments, the effector domain comprises one or more KAP1 proteins. A KAP1 protein in an epigenetic editor herein may form a complex with one or more other effector domains of the epigenetic editor or one or more proteins involved in modulation of gene expression in a cellular environment. For example, KAP1 may be recruited by a KRAB domain of a transcriptional repressor. A KAP1 protein domain may interact with or recruit one or more protein complexes that reduces or silences gene expression. In some embodiments, KAP1 interacts with or recruits a histone deacetylase protein, a histone-lysine methyltransferase protein, a chromatin remodeling protein, and/or a heterochromatin protein. For example, a KAP1 protein domain may interact with or recruit a heterochromatin protein 1 (HP1) protein, a SETDB1 protein, an HDAC protein, and/or a NuRD protein complex component. In some embodiments, a KAP1 protein domain interacts with or recruits a ZFP90 protein (e.g., isoform 2 of ZFP90), and/or a FOXP3 protein. An exemplary KAP1 amino acid sequence is shown in SEQ ID NO: 629.

[0171] In some embodiments, the effector domain comprises a protein domain that interacts with or is recruited by one or more DNA epigenetic marks. For example, the effector domain may comprise a methyl CpG binding protein 2 (MECP2) protein that interacts with methylated DNA nucleotides in the target gene (which may or may not be at a CpG island of the target gene). An MECP2 protein domain in an epigenetic editor described herein may induce condensed chromatin structure, thereby reducing or silencing expression of the target gene. In some embodiments, an MECP2 protein domain in an epigenetic editor described herein may interact with a histone deacetylase (e.g. HDAC), thereby repressing or silencing expression of the target gene. In some embodiments, an MECP2 protein domain in an epigenetic editor described herein may block access of a transcription factor or transcriptional activator to the target sequence, thereby repressing or silencing expression of the target gene. An exemplary MECP2 amino acid sequence is shown in SEQ ID NO: 630.

[0172] Also contemplated as effector domains for the epigenetic editors described herein are, e.g., a chromoshadow domain, a ubiquitin-2 like Rad60 SUMO-like (Rad60-SLD/SUMO) domain, a chromatin organization modifier domain (Chromo) domain, a Yaf2/RYBP C-terminal binding motif domain (YAF2_RYBP), a CBX family C-terminal motif domain (CBX7_C), a zinc finger C3HC4 type (RING finger) domain (ZF-C3HC4_2), a cytochrome b5 domain (Cyt-b5), a helix-loop-helix domain (HLH), a helix-hairpin-helix motif domain (e.g., HHH_3), a high mobility group box domain (HMG-box), a basic leucine zipper domain (e.g., bZIP_1 or bZIP_2), a Myb_DNA-binding domain, a homeodomain, a MYM-type zinc finger with FCS sequence domain (ZF-FCS), an interferon regulatory factor 2-binding protein zinc finger domain (IRF-2BP1_2), an SSX repressor domain (SSXRD), a B-box-type zinc finger domain (ZF-B_box), a CXXC zinc finger domain (ZF-CXXC), a regulator of chromosome condensation 1 domain (RCC1), an SRC homology 3 domain (SH3_9), a sterile alpha motif domain (SAM_1), a sterile alpha motif domain (SAM_2), a sterile alpha motif/Pointed domain (SAM_PNT), a Vestigial/Tondu family domain (Vg_Tdu), a LIM domain, an RNA recognition motif domain (RRM_1), a paired amphipathic helix domain (PAH), a proteasomal ATPase OB C-terminal domain (Prot_ATP_ID_OB), a nervy homology 2 domain (NHR2), a hinge domain of cleavage stimulation factor subunit 2 (CSTF2_hinge), a PPAR gamma N-terminal region domain (PPARgamma_N), a CDC48 N-terminal domain (CDC48_2), a WD40 repeat domain (WD40), a Fip1 motif domain (Fip1), a PDZ domain (PDZ_6), a Von Willebrand factor type C domain (VWC), a NAB conserved region 1 domain (NCD1), an S1 RNA-binding domain (S1), an HNF3 C-terminal domain (HNF_C), a Tudor domain (Tudor_2), a histone-like transcription factor (CBF/NF-Y) and archaeal histone domain (CBFD_NFYB_HMF), a zinc finger protein domain (DUF3669), an EGF-like domain (cEGF), a GATA zinc finger domain (GATA), a TEA/ATTS domain (TEA), a phorbol esters/diacylglycerol binding domain (C1-1), polycomb-like MTF2 factor 2 domain (Mtf2_C), a transactivation domain of FOXO protein family (FOXO-TAD), a homeobox KN domain (Homeobox_KN), a BED zinc finger domain (ZF-BED), a zinc finger of C3HC4-type RING domain (ZF-C3HC4_4), a RAD51 interacting motif domain (RAD51_interact), a p55-binding region of a methyl-CpG-binding domain protein MBD (MBDa), a Notch domain, a Raf-like Ras-binding domain (RBD), a Spin/Ssty family domain (Spin-Ssty), a PHD finger domain (PHD_3), a Low-density lipoprotein receptor domain class A (Ldl_recept_a), a CS domain, a DM DNA-binding domain, and a QLQ domain.

[0173] In some embodiments, the effector domain is a protein domain comprising a YAF2_RYBP domain or homeodomain or any combination thereof. In certain embodiments, the homeodomain of the YAF2_RYBP domain is a PRD domain, an NKL domain, a HOXL domain, or a LIM domain. In particular embodiments, the YAF2_RYBP domain may comprise a 32 amino acid Yaf2/RYBP C-terminal binding motif domain (32 aa RYBP).

[0174] In some embodiments, the effector domain comprises a protein domain selected from a group consisting of SUMO3 domain, Chromo domain from M phase phosphoprotein 8 (MPP8), chromoshadow domain from Chromobox 1 (CBX1), and SAM_1/SPM domain from Scm Polycomb Group Protein Homolog 1 (SCMH1).

[0175] In some embodiments, the effector domain comprises an HNF3 C-terminal domain (HNF_C). The HNF_C domain may be from FOXA1 or FOXA2. In certain embodiments, the HNF_C domain comprises an EH1 (engrailed homology 1) motif.

[0176] In some embodiments, the effector domain may comprise an interferon regulatory factor 2-binding protein zinc finger domain (IRF-2BP1_2), a Cyt-b5 domain from DNA repair factor HERC2 E3 ligase, a variant SH3 domain (SH3_9) from Bridging Integrator 1 (BIN1), an HMG-box domain from transcription factor TOX or ZF-C3HC4_2 RING finger domain from the polycomb component PCGF2, a Chromodomain-helicase-DNA binding protein 3 (CHD3) domain, or a ZNF783 domain.

### IV. Epigenetic Editors

[0177] Provided herein are epigenetic editors (i.e., epigenetic editing systems) that direct epigenetic modification(s) to a target sequence in a gene of interest, e.g., using one or more DNA-binding domains as described herein and one or more effector domains (e.g., epigenetic repressor domains) as described herein, in any combination. The DNA-binding domain (in concert with a guide polynucleotide such as one described herein, where the DNA-binding domain is a polynucleotide guided DNA-binding domain) directs the effector domain to epigenetically modify the target sequence, resulting in gene repression or silencing that may be durable and inheritable across cell generations. In some aspects, the epigenetic editors described herein can repress or silence genes reversibly or irreversibly in cells.

[0178] In particular embodiments, an epigenetic editor described herein comprises one or more fusion proteins, each comprising (1) DNA-binding domain(s) and (2) effector domain(s). The effector domains may be on one or more fusion proteins comprised by the epigenetic editor. For example, a single fusion protein may comprise all of the effector domains with a DNA-binding domain. Alternatively, the effector domains or subsets thereof may be on separate fusion proteins, each with a DNA-binding domain (which may be the same or different). A fusion protein described herein may further comprise one or more linkers (e.g., peptide linkers), detectable tags, nuclear localization signals (NLSs), or any combination thereof. As used herein, a “fusion protein” refers to a chimeric protein in which two or more coding sequences (e.g., for DNA-binding domain(s) and/or effector domain(s)) are covalently or non-covalently joined, directly or indirectly.

[0179] In some embodiments, an epigenetic editor described herein comprises 2, 3, 4, 5, 6, 7, 8, 9, 10, or more effector (e.g., repression/repressor) domains, which may be identical or different. In certain embodiments, two or more of said effector domains function synergistically. Combinations of effector domains may comprise DNA methylation domains, histone deacetylation domains, histone methylation domains, and/or scaffold domains that recruit any of the above. For example, an epigenetic editor described herein may comprise one or more transcriptional repressor domains (e.g., a KRAB domain such as KOX1, ZIM3, ZFP28, or ZN627 KRAB) in combination with one or more DNA methylation domains (e.g., a DNMT domain) and/or recruiter domain (e.g., a DNMT3L domain). Such an epigenetic editor may comprise, for instance, a KRAB domain, a DNMT3A domain, and a DNMT3L domain. In some embodiments, the epigenetic editor further comprises an additional effector domain (e.g., a KAP1, MECP2, HP1b, CBX8, CDYL2, TOX, TOX3, TOX4, EED, RBBP4, RCOR1, or SCML2 domain). In some embodiments, the additional effector domain is a CDYL2, TOX, TOX3, TOX4, or HP1a domain. For example, an epigenetic editor described herein may comprise a CDYL2 and/or a TOX domain in combination with a KRAB domain (e.g., a KOX1 KRAB domain).

### A. Linkers

[0180] A fusion protein as described herein may comprise one or more linkers that connect components of the epigenetic editor. A linker may be a peptide or non-peptide linker.

[0181] In some embodiments, one or more linkers utilized in an epigenetic editor provided herein is a peptide linker, i.e., a linker comprising a peptide moiety. A peptide linker can be any length applicable to the epigenetic editor fusion proteins described herein. In some embodiments, the linker can comprise a peptide between 1 and 200 (e.g., between 1 and 80) amino acids. In some embodiments, the linker comprises from 1 to 5, 1 to 10, 1 to 20, 1 to 30, 1 to 40, 1 to 50, 1 to 60, 1 to 80, 1 to 100, 1 to 150, 1 to 200, 5 to 10, 5 to 20, 5 to 30, 5 to 40, 5 to 60, 5 to 80, 5 to 100, 5 to 150, 5 to 200, 10 to 20, 10 to 30, 10 to 40, 10 to 50, 10 to 60, 10 to 80, 10 to 100, 10 to 150, 10 to 200, 20 to 30, 20 to 40, 20 to 50, 20 to 60, 20 to 80, 20 to 100, 20 to 150, 20 to 200, 30 to 40, 30 to 50, 30 to 60, 30 to 80, 30 to 100, 30 to 150, 30 to 200, 40 to 50, 40 to 60, 40 to 80, 40 to 100, 40 to 150, 40 to 200, 50 to 60 50 to 80, 50 to 100, 50 to 150, 50 to 200, 60 to 80, 60 to 100, 60 to 150, 60 to 200, 80 to 100, 80 to 150, 80 to 200, 100 to 150, 100 to 200, or 150 to 200 amino acids in length. Longer or shorter linkers are also contemplated. In some embodiments, the peptide linker is 3, 4, 5, 6, 7, 8, 9, 10, 11, 12, 13, 14, 15, 16, 17, 18, 19, 20, 25, 30, 25, 40, 45, 50, 55, 60, 65, 70, 75, 80, 85, 90, 95, or 100 amino acids in length. For example, the peptide linker may be 4, 5, 16, 20, 24, 27, 32, 40, 64, 92, or 104 amino acids in length. The peptide linker may be a flexible or rigid linker. In particular embodiments, the peptide linker comprises the amino acid sequence of any one of SEQ ID NOs: 631-637 and 664-666 or a sequence at least 75%, 80%, 85%, 90%, 91%, 92%, 93%, 94%, 95%, 96%, 97%, 98%, or 99% identical thereto.

[0182] In certain embodiments, the peptide linker is an XTEN linker. Such a linker may comprise part of the XTEN sequence (Schellenberger et al., Nat Biotechnol (2009) 27 (1): 1186-90), an unstructured hydrophilic polypeptide consisting only of residues G, S, P, T, E, and A. The term “XTEN” as used herein refers to a recombinant peptide or polypeptide lacking hydrophobic amino acid residues. XTEN linkers typically are unstructured and comprise a limited set of natural amino acids. Fusion of XTEN to proteins alters its hydrodynamic properties and reduces the rate of clearance and degradation of the fusion protein. These XTEN fusion proteins are produced using recombinant technology, without the need for chemical modifications, and degraded by natural pathways. The XTEN linker may be, for example, 5, 10, 16, 20, 26, or 80 amino acids in length. In some embodiments, the XTEN linker is 16 amino acids in length. In some embodiments, the XTEN linker is 80 amino acids in length. In certain embodiments, the XTEN linker may be XTEN10, XTEN16, XTEN20, or XTEN80. In certain embodiments, the XTEN linker may comprise the amino acid sequence of any one of SEQ ID NOs: 638-643 or a sequence at least 75%, 80%, 85%, 90%, 91%, 92%, 93%, 94%, 95%, 96%, 97%, 98%, or 99% identical thereto. In particular embodiments, the XTEN linker comprises the amino acid sequence of SEQ ID NO: 638. In particular embodiments, the XTEN linker comprises the amino acid sequence of SEQ ID NO: 643.

[0183] In some embodiments, one or more linkers utilized in an epigenetic editor provided herein is a non-peptide linker. For example, the linker may be a carbon bond, a disulfide bond, or carbon-heteroatom bond. In certain embodiments, the linker is a carbon-nitrogen bond of an amide linkage. In certain embodiments, the linker is a cyclic or acyclic, substituted or unsubstituted, or branched or unbranched aliphatic or heteroaliphatic linker.

[0184] In some embodiments, one or more linkers utilized in an epigenetic editor provided herein is polymeric (e.g., polyethylene, polyethylene glycol, polyamide, polyester, etc.). The linker may comprise, for example, a monomer, dimer, or polymer of aminoalkanoic acid; an aminoalkanoic acid (e.g., glycine, ethanoic acid, alanine, beta-alanine, 3-aminopropanoic acid, 4-aminobutanoic acid, 5-pentanoic acid, etc.); a monomer, dimer, or polymer of aminohexanoic acid (Ahx); or a polyethylene glycol moiety (PEG); or an aryl or heteroaryl moiety. In certain embodiments, the linker may be based on a carbocyclic moiety (e.g., cyclopentane or cyclohexane) or a phenyl ring. The linker may include functionalized moieties to facilitate attachment of a nucleophile (e.g., thiol, amino) from the peptide to the linker. Any electrophile may be used as part of the linker. Exemplary electrophiles include, but are not limited to, activated esters, activated amides, alkyl halides, aryl halides, acyl halides, and isothiocyanates.

[0185] Various linker lengths and flexibilities can be employed between any two components of an epigenetic editor (e.g., between an effector domain (e.g., a repressor domain) and a DNA-binding domain (e.g., a Cas9 domain), between a first effector domain and a second effector domain, etc.). The linkers may range from very flexible linkers, such as glycine/serine-rich linkers, to more rigid linkers, in order to achieve the optimal length for effector domain activity for the specific application. In some embodiments, the more flexible linkers are glycine/serine-rich linkers (GS-rich linkers), where more than 45% (e.g., more than 48, 50, 55, 60, 70, 80, or 90%) of the residues are glycine or serine residues. Non-limiting examples of the GS-rich linkers are (GGGGS)n (SEQ ID NO: 1285), (G)n (SEQ ID NO: 1288), and W linker (SEQ ID NO: 637). In some embodiments, the more rigid linkers are in the form of the form (EAAAK)n (SEQ ID NO: 1286), (SGGS)n (SEQ ID NO: 1287), and (XP)n (SEQ ID NO: 1289)). In the aforementioned formulae of flexible and rigid linkers, n may be any integer between 1 and 30. In some embodiments, n is 1, 2, 3, 4, 5, 6, 7, 8, 9, 10, 11, 12, 13, 14, or 15. In some embodiments, the linker comprises a (GGS)n motif, wherein n is 1, 3, or 7 (SEQ ID NO: 1290). In some embodiments, the linker comprises a (GGGGS)n motif, wherein n is 4 (SEQ ID NO: 636).

[0186] In some embodiments, a linker in an epigenetic editor described herein comprises a nuclear localization signal, for example, with the amino acid sequence of any one of SEQ ID NOs: 644-649. In some embodiments, a linker in an epigenetic editor described herein comprises an expression tag, e.g., a detectable tag such as a green fluorescent protein.

### B. Nuclear Localization Signals

[0187] A fusion protein described herein may comprise one or more nuclear localization signals, and in certain embodiments, may comprise two or more nuclear localization signals. For example, the fusion protein may comprise 1, 2, 3, 4, 5, 6, 7, 8, 9, 10, or more nuclear localization signals. As used herein, a “nuclear localization signal” (NLS) is an amino acid sequence that directs proteins to the nucleus. In certain embodiments, the NLS may be an SV40 NLS (e.g., with the amino acid sequence of SEQ ID NO: 644). The fusion protein may comprise an NLS at its N-terminus, C-terminus, or both, and/or an NLS may be embedded in the middle of the fusion protein (e.g., at the N- or C-terminus of a DNA-binding domain or an effector domain).

[0188] In some embodiments, the fusion protein may comprise two NLSs. The fusion protein may comprise two NLSs at its N-terminus or C-terminus. The fusion protein may comprise one NLS located at its N-terminus and one NLS embedded in the middle of the fusion protein, or one NLS located at its C-terminus and one NLS embedded in the middle of the fusion protein. The fusion protein may comprise two NLSs embedded in the middle of the fusion protein.

[0189] In some embodiments, the fusion protein may comprise four NLSs. The fusion protein may comprise at least two (e.g., two, three, or four) NLSs at its N-terminus or C-terminus. The fusion protein may comprise at least one (e.g., one, two, three, or four) NLSs embedded in the middle of the fusion protein. In particular embodiments, the fusion protein may comprise two NLSs at its N-terminus and two NLSs at its C-terminus.

[0190] An NLS described herein may be an endogenous NLS sequence. In certain embodiments, an NLS described herein comprises the amino acid sequence of any one of SEQ ID NOs: 644-649, or a sequence at least 75%, 80%, 85%, 90%, 91%, 92%, 93%, 94%, 95%, 96%, 97%, 98%, or 99% identical to the selected sequence. In particular embodiments, the NLS comprises the amino acid sequence of SEQ ID NO: 644. Additional NLSs are known in the art.

[0191] In some embodiments, an epigenetic editor comprising a fusion protein that comprises at least one NLS at the N-terminus and at least one NLS at the C-terminus may increase the efficiency of the epigenetic editor by at least 5%, at least 10%, at least 15%, at least 20%, at least 30%, at least 40%, at least 50%, at least 60%, at least 70%, at least 80%, at least 90%, at least 100%, at least 200%, at least 300%, at least 400%, at least 500%, at least 600%, at least 700%, at least 800%, at least 900%, at least 1,000%, at least 5,000%, at least 10,000%, at least 50,000%, at least 100,000%, or more as compared to an epigenetic editor with a corresponding fusion protein that does not have at least one NLS at the N-terminus and at least one NLS at the C-terminus.

[0192] In some embodiments, an epigenetic editor comprising a fusion protein that comprises two NLSs at the N-terminus and two NLSs at the C-terminus may increase the efficiency of the epigenetic editor by at least 5%, at least 10%, at least 15%, at least 20%, at least 30%, at least 40%, at least 50%, at least 60%, at least 70%, at least 80%, at least 90%, at least 100%, at least 200%, at least 300%, at least 400%, at least 500%, at least 600%, at least 700%, at least 800%, at least 900%, at least 1,000%, at least 5,000%, at least 10,000%, at least 50,000%, at least 100,000%, or more as compared to an epigenetic editor with a corresponding fusion protein that does not have two NLSs at the N-terminus and two NLSs at the C-terminus.

### C. Tags

[0193] Epigenetic editors provided herein may comprise one or more additional sequences (“tags”) for tracking, detection, and localization of the editors. In some embodiments, the epigenetic editor comprises 1, 2, 3, 4, 5, 6, 7, 8, 9, 10 or more detectable tags. Each of the detectable tags may be the same or different.

[0194] For example, an epigenetic editor fusion protein may comprise cytoplasmic localization sequences, export sequences, such as nuclear export sequences, or other localization sequences, as well as sequence tags that are useful for solubilization, purification, or detection of the fusion proteins. Suitable protein tags provided herein include, but are not limited to, biotin carboxylase carrier protein (BCCP) tags, myc-tags, calmodulin-tags, FLAG-tags, hemagglutinin (HA)-tags, poly-histidine tags (also referred to as histidine tags or His-tags), maltose binding protein (MBP)-tags, nus-tags, glutathione-S-transferase (GST)-tags, green fluorescent protein (GFP)-tags, thioredoxin-tags, S-tags, Softags (e.g., Softag 1 or Softag 3), strep-tags, biotin ligase tags, FlAsH tags, V5 tags, and SBP-tags. Additional suitable sequences will be apparent to those of skill in the art.

### D. Fusion Protein Configurations

[0195] A fusion protein of an epigenetic editor described herein may have its components structured in different configurations. For example, the DNA-binding domain may be at the C-terminus, the N-terminus, or in between two or more epigenetic effector domains or additional domains. In some embodiments, the DNA-binding domain is at the C-terminus of the epigenetic editor. In some embodiments, the DNA-binding domain is at the N-terminus of the epigenetic editor. In some embodiments, the DNA-binding domain is linked to one or more nuclear localization signals. In some embodiments, the DNA-binding domain is flanked by an epigenetic effector domain and/or an additional domain on both sides. In some embodiments, where “DBD” indicates DNA-binding domain and “ED” indicates effector domain, the epigenetic editor comprises the configuration of:

[chemical structure]

[0196] In some embodiments, an epigenetic editor comprises a DNA-binding domain (DBD), a DNA methyltransferase (DNMT) domain, and a transcriptional repressor (“repressor”) domain that represses or silences expression of a target gene. The DBD, DNMT, and transcriptional repressor domains may be any as described herein, in any combination. The DBD, DNMT domain, and repressor domain may be in any configuration, e.g., with any of said domains at the N-terminus, at the C-terminus, or in the middle of the fusion protein. In some embodiments, the epigenetic editor comprises a fusion protein with the configuration of:

[chemical structure]

[0197] In some embodiments, a connecting structure “]-[” in any one of the epigenetic editor structures is a linker, e.g., a peptide linker; a detectable tag; a peptide bond; a nuclear localization signal; and/or a promoter or regulatory sequence. In an epigenetic editor structure, the multiple connecting structures “]-[” may be the same or may each be a different linker, tag, NLS, or peptide bond. In some embodiments, the DNMT domain may comprise any one of the domains in Table 7, or any combinations or homologs thereof. In particular embodiments, the DNMT domain comprises DNMT3A or a truncated version thereof, DNMT3L or a truncated version thereof, or both. In particular embodiments, the DBD is a catalytically inactive polynucleotide guided DNA-binding domain (e.g., a dCas9) or a ZFP domain. In certain embodiments, the repressor domain comprises any one of the domains shown in Table 5 or 6, or any combinations or homologs thereof. For example, the repressor domain may be a KRAB domain. In certain embodiments, the repressor domain is a ZFP28, ZN627, KAP1, MeCP2, HP1b, CBX8, CDYL2, TOX, Tox3, Tox4, EED, RBBP4, RCOR1, or SCML2 domain, or a fusion of two of said domains (e.g., a fusion of the N- and C-terminal regions of ZIM3 and KOX1 KRAB). In particular embodiments, the repressor domain is a KRAB domain from ZFP28, ZN627, ZIM3, or KOX1.

[0198] In some embodiments, the epigenetic editor comprises a configuration selected from

[chemical structure]

wherein [DNMT3A-DNMT3L] indicates that the DNMT3A and DNMT3L domains are directly fused via a peptide bond, and wherein the connecting structure]-[ is any one of the linkers as described herein, a detectable tag, an affinity domain, a peptide bond, a nuclear localization signal, a promoter, and/or a regulatory sequence. The DBD, repressor, DNMT3A, and DNMT3L domains may be any as described herein, in any combination. For example, the DNMT3A and DNMT3L domains may be selected from those in Table 7. In particular embodiments, the DBD is a CRISPR-associated protein domain (e.g., dCas9) or a ZFP domain; the repressor domain is a KRAB domain derived from KOX1, ZIM3, ZFP28, or ZN627; the DNMT3A domain is a human DNMT3A domain; and the DNMT3L domain is a human or mouse DNMT3L domain; any combination of these components is also contemplated by the present disclosure.

[0199] In some embodiments, the epigenetic editor comprises a configuration selected from

[chemical structure]

wherein [DNMT3A-DNMT3L] indicates that the DNMT3A and DNMT3L domains are directly fused via a peptide bond, and wherein the connecting structure]-[ is any one of the linkers as described herein, a detectable tag, an affinity domain, a peptide bond, a nuclear localization signal, a promoter, and/or a regulatory sequence. The DBD, SETDB1, DNMT3A, and DNMT3L domains may be any as described herein, in any combination. In particular embodiments, the DBD is a CRISPR-associated protein domain (e.g., dCas9) or a ZFP domain; the SETDB 1 domain is derived from human SETDB1, ZIM3, ZFP28, or ZN627; the DNMT3A domain is a human DNMT3A domain; and the DNMT3L domain is a human or mouse DNMT3L domain; any combination of these components is also contemplated by the present disclosure.

[0200] Particular constructs contemplated herein include:

[chemical structure]

The DNMT3L and DNMT3A may be derived from human parental proteins, mouse parental proteins, or any combination thereof. In certain embodiments, the DNMT3L and DNMT3A are derived from mouse and human parental proteins, respectively (mDNMT3L and hDNMT3A). In certain embodiments, the DNMT3L and DNMT3A are both derived from human parental proteins (hDNMT3L and hDNMT3A). In some embodiments, the dCas9 is dSpCas9. In some embodiments, the KOX1 is human KOX1. Also contemplated is any of Configurations 1-6 wherein the KOX1 KRAB domain is replaced by a ZFP28, ZN627, or ZIM3 KRAB domain. In some embodiments, the ZFP28, ZN627, and ZIM3 are human ZFP28, ZN627, and ZIM3, respectively. In particular embodiments, the fusion construct may have the configuration:

[chemical structure]

[0201] In particular embodiments, a fusion construct described herein may have Configuration 1 and comprise SEQ ID NO: 658, or a sequence at least 75%, 80%, 85%, 90%, 91%, 92%, 93%, 94%, 95%, 96%, 97%, 98%, or 99% identical thereto. In SEQ ID NO: 658 below, the XTEN linkers are underlined, the W linker is bolded, underlined, and italicized, the NLS sequences are bolded, the DNMT3A sequence is italicized, the DNMT3L sequence is underlined and italicized, the dCas9 domain is bolded and italicized, and the KOX1 KRAB domain is underlined and bolded:

(SEQ ID NO: 658)
MNHDQEFDPPKVYPPVPAEKRKPIRVLSLFD
GIATGLLVLKDLGIQVDRYIASEVCEDSITV
GMVRHQGKIMYVGDVRSVTQKHIQEWGPFDL
VIGGSPCNDLSIVNPARKGLYEGTGRLFFEF
YRLLHDARPKEGDDRPFFWLFENVVAMGVSD
KRDISRFLESNPVMIDAKEVSAAHRARYFWG
NLPGMNRPLASTVNDKLELQECLEHGRIAKF
SKVRTITTRSNSIKQGKDQHFPVFMNEKEDI
LWCTEMERVFGFPVHYTDVSNMSRLARQRLL
GRSWSVPVIRHLFAPLKEYFACV
SSGNSNANSRGPSFSSGLVPLSLRGSH
MGPMEIYKTVSAWKRQPVRVLSLFRNIDKVL
KSLGFLESGSGSGGGTLKYVEDVTNVVRRDV
EKWGPFDLVYGSTQPLGSSCDRCPGWYMFQF
HRILQYALPRQESQRPFFWIFMDNLLLTEDD
QETTTRFLQTEAVTLQDVRGRDYQNAMRVWS
NIPGLKSKHAPLTPKEEEYLQAQVRSRSKLD
APKVDLLVKNCLLPLREYFKYFSQNSLPLGG
PSSGAPPPSGGSPAGSPTSTEEGTSESATPE
SGPGTSTEPSEGSAPGSPAGSPTSTEEGTST
EPSEGSAPGTSTEPSE
PKKKRKVYMDKKYSIGLAIGTNSVGWA
VITDEYKVPSKKFKVLGNTDRHSIKKN
LIGALLFDSGETAEATRLKRTARRRYT
RRKNRICYLQEIFSNEMAKVDDSFFHR
LEESFLVEEDKKHERHPIFGNIVDEVA
YHEKYPTIYHLRKKLVDSTDKADLRLI
YLALAHMIKFRGHFLIEGDLNPDNSDV
DKLFIQLVQTYNQLFEENPINASGVDA
KAILSARLSKSRRLENLIAQLPGEKKN
GLFGNLIALSLGLTPNFKSNFDLAEDA
KLQLSKDTYDDDLDNLLAQIGDQYADL
FLAAKNLSDAILLSDILRVNTEITKAP
LSASMIKRYDEHHQDLTLLKALVRQQL
PEKYKEIFFDQSKNGYAGYIDGGASQE
EFYKFIKPILEKMDGTEELLVKLNRED
LLRKQRTFDNGSIPHQIHLGELHAILR
RQEDFYPFLKDNREKIEKILTFRIPYY
VGPLARGNSRFAWMTRKSEETITPWNF
EEVVDKGASAQSFIERMTNFDKNLPNE
KVLPKHSLLYEYFTVYNELTKVKYVTE
GMRKPAFLSGEQKKAIVDLLFKTNRKV
TVKQLKEDYFKKIECFDSVEISGVEDR
FNASLGTYHDLLKIIKDKDFLDNEENE
DILEDIVLTLTLFEDREMIEERLKTYA
HLFDDKVMKQLKRRRYTGWGRLSRKLI
NGIRDKQSGKTILDFLKSDGFANRNFM
QLIHDDSLTFKEDIQKAQVSGQGDSLH
EHIANLAGSPAIKKGILQTVKVVDELV
KVMGRHKPENIVIEMARENQTTQKGQK
NSRERMKRIEEGIKELGSQILKEHPVE
NTQLQNEKLYLYYLQNGRDMYVDQELD
INRLSDYDVDAIVPQSFLKDDSIDNKV
LTRSDKNRGKSDNVPSEEVVKKMKNYW
RQLLNAKLITQRKFDNLTKAERGGLSE
LDKAGFIKRQLVETRQITKHVAQILDS
RMNTKYDENDKLIREVKVITLKSKLVS
DFRKDFQFYKVREINNYHHAHDAYLNA
VVGTALIKKYPKLESEFVYGDYKVYDV
RKMIAKSEQEIGKATAKYFFYSNIMNF
FKTEITLANGEIRKRPLIETNGETGEI
VWDKGRDFATVRKVLSMPQVNIVKKTE
VQTGGFSKESILPKRNSDKLIARKKDW
DPKKYGGFDSPTVAYSVLVVAKVEKGK
SKKLKSVKELLGITIMERSSFEKNPID
FLEAKGYKEVKKDLIIKLPKYSLFELE
NGRKRMLASAGELQKGNELALPSKYVN
FLYLASHYEKLKGSPEDNEQKQLFVEQ
HKHYLDEIIEQISEFSKRVILADANLD
KVLSAYNKHRDKPIREQAENIIHLFTL
TNLGAPAAFKYFDTTIDRKRYTSTKEV
LDATLIHQSITGLYETRIDLSQLGGDP
KKKRKVSGSETPGTSESATPESTGRTL
VTFKDVFVDFTREEWKLLDTAQQIVYR
NVMLENYKNLVSLGYQLTKPDVILRLE
KGEEP

[0202] In particular embodiments, a fusion construct described herein may have Configuration 2 and comprise SEQ ID NO: 659, or a sequence at least 75%, 80%, 85%, 90%, 91%, 92%, 93%, 94%, 95%, 96%, 97%, 98%, or 99% identical thereto. In SEQ ID NO: 659 below, the XTEN linkers are underlined, the W linker is bolded, underlined, and italicized, the NLS sequences are bolded and underlined, the DNMT3A sequence is italicized, the DNMT3L sequence is underlined and italicized, the ZFP domain is bolded, and the KOX1 KRAB domain is underlined and bolded. Variable amino acids represented by Xs are the amino acids of the DNA-recognition helix of the zinc finger and XX in italics may be either TR, LR or LK.

(SEQ ID NO: 659)
MNHDQEFDPPKVYPPVPAEKRKPIRV
LSLFDGIATGLLVLKDLGIQVDRYIA
SEVCEDSITVGMVRHQGKIMYVGDVR
SVTQKHIQEWGPFDLVIGGSPCNDLS
IVNPARKGLYEGTGRLFFEFYRLLHD
ARPKEGDDRPFFWLFENVVAMGVSDK
RDISRFLESNPVMIDAKEVSAAHRAR
YFWGNLPGMNRPLASTVNDKLELQEC
LEHGRIAKFSKVRTITTRSNSIKQGK
DQHFPVFMNEKEDILWCTEMERVFGF
PVHYTDVSNMSRLARQRLLGRSWSVP
VIRHLFAPLKEYFACVSSGNSNANSR
GPSFSSGLVPLSLRGSHMGPMEIYKT
VSAWKRQPVRVLSLFRNIDKVLKSLG
FLESGSGSGGGTLKYVEDVTNVVRRD
VEKWGPFDLVYGSTQPLGSSCDRCPG
WYMFQFHRILQYALPRQESQRPFFWI
FMDNLLLTEDDQETTTRFLQTEAVTL
QDVRGRDYQNAMRVWSNIPGLKSKHA
PLTPKEEEYLQAQVRSRSKLDAPKVD
LLVKNCLLPLREYFKYFSQNSLPLGG
PSSGAPPPSGGSPAGSPTSTEEGTSE
SATPESGPGTSTEPSEGSAPGSPAGS
PTSTEEGTSTEPSEGSAPGTSTEPSE
PKKKRKVYSRPGERPFQCRICMRNFS
XXXXXXXHXXTHTGEKPFQCRICMRN
FSXXXXXXXHXXTH[linker]
PFQCRICMRNFSXXXXXXXHXXTHTG
EKPFQCRICMRNFSXXXXXXXHXXTH
[linker]PFQCRICMRNFSXX
XXXXXHXXTHTGEKPFQCRICMRNFS
XXXXXXXHXXTHLRGSPKKKRKVSGS
ETPGTSESATPESTGRTLVTFKDVFV
DFTREEWKLLDTAQQIVYRNVMLENY
KNLVSLGYQLTKPDVILRLEKGEEP

In certain embodiments, the six “XXXXXXX” regions in SEQ ID NO: 659 comprise amino acid sequences that form a zinc finger. In the sequence above, [linker] represents a linker sequence. In some embodiments, one or both linker sequences may be TGSQKP (SEQ ID NO: 651). In some embodiments, one or both linker sequences may be TGGGGSQKP (SEQ ID NO: 652). In some embodiments, one linker sequence may have the amino acid sequence of SEQ ID NO: 651 and the other linker sequence may have the amino acid sequence of SEQ ID NO: 652.

[0203] In particular embodiments, a fusion construct described herein may have Configuration 7 and comprise SEQ ID NO: 660, or a sequence at least 75%, 80%, 85%, 90%, 91%, 92%, 93%, 94%, 95%, 96%, 97%, 98%, or 99% identical thereto.

[0204] In particular embodiments, a fusion construct described herein may have Configuration 9 and comprise SEQ ID NO: 661, or a sequence at least 75%, 80%, 85%, 90%, 91%, 92%, 93%, 94%, 95%, 96%, 97%, 98%, or 99% identical thereto.

[0205] In particular embodiments, a fusion construct described herein may have Configuration 11 and comprise SEQ ID NO: 662, or a sequence at least 75%, 80%, 85%, 90%, 91%, 92%, 93%, 94%, 95%, 96%, 97%, 98%, or 99% identical thereto.

[0206] In particular embodiments, a fusion construct described herein may have Configuration 13 and comprise SEQ ID NO: 663, or a sequence at least 75%, 80%, 85%, 90%, 91%, 92%, 93%, 94%, 95%, 96%, 97%, 98%, or 99% identical thereto.

[0207] In some embodiments, a fusion construct described herein (e.g., the fusion construct of any one of Configurations 1-14) is within an expression construct that comprises a WPRE sequence, a polyadenylation site, or both. In certain embodiments, the WPRE sequence is in a 3′ noncoding region. In certain embodiments, the WPRE sequence is upstream from a poly-adenylation site. In particular embodiments, the expression construct comprises the fusion construct (e.g., of any one of Configurations 1-14) and a WPRE sequence in a 3′ noncoding region upstream from a polyadenylation site.

[0208] Multiple fusion proteins may be used to effect activation or repression of a target gene or multiple target genes. For example, an epigenetic editor fusion protein comprising a DNA-binding domain (e.g., a dCas9 domain) and an effector domain may be co-delivered with two or more guide polynucleotides (e.g., gRNAs), each targeting a different target DNA sequence. The target sites for two of the DNA-binding domains may be the same or in the vicinity of each other, or separated by, for example, about 100 base pairs, about 200 base pairs, about 300 base pairs, about 400 base pairs, about 500 base pairs, or about 600 or more base pairs. In addition, when targeting double-strand DNA, such as an endogenous gene locus, the guide polynucleotides may target the same or different strands (one or more to the positive strand and/or one or more to the negative strand).

[0209] In some embodiments, an epigenetic editor targeting B2M is used in combination with epigenetic editor(s) targeting TRAC, TRBC, CIITA, PDCD1, TIM-3, TIGIT, LAG3, CTLA4, AAVS1, CCR5, TET2, TGFBR2, A2AR, CISH, PTPN11, PTPN6, PTPA, PTPN2, JUNB, TOX, TOX2, NR4A1, NR4A2, NR4A3, MAP4K1, REL, IRF4, DGKA, PIK3CD, HLA-A, USP16, DCK, FAS, or any combination thereof.

### V. Target Sequences

[0210] An epigenetic editor herein may be directed to a target sequence in B2M to effect epigenetic modification of the B2M gene.

[0211] As used herein, a “target sequence,” a “target site,” or a “target region” is a nucleic acid sequence present in a gene of interest; in some instances, the target sequence may be outside but in the vicinity of the gene of interest wherein methylation or binding by a repressor of the target sequence represses expression of the gene. In some embodiments, the target sequence may be a hypomethylated or hypermethylated nucleic acid sequence.

[0212] The target sequence may be in any part of a target gene. In some embodiments, the target sequence is part of or near a noncoding sequence of the gene. In some embodiments, the target sequence is part of an exon of the gene. In some embodiments, the target sequence is part of or near a transcriptional regulatory sequence of the gene, such as a promoter or an enhancer. In some embodiments, the target sequence is adjacent to, overlaps with, or encompasses a CpG island. In certain embodiments, the target sequence is within about 3000, 2900, 2800, 2700, 2600, 2500, 2400, 2300, 2200, 2100, 2000, 1900, 1800, 1700, 1600, 1500, 1400, 1300, 1200, 1100, 1000, 900, 800, 700, 600, 500, 400, 300, 200, or 100 base pairs (bp) flanking a B2M TSS. In certain embodiments, the target sequence is within 500 bp flanking the B2M TSS. In certain embodiments, the target sequence is within 1000 bp flanking the B2M TSS.

[0213] In some embodiments, the target sequence may hybridize to a guide polynucleotide sequence (e.g., gRNA) complexed with a fusion protein comprising a polynucleotide guided DNA-binding domain (e.g., a CRISPR protein such as dCas9) and effector domain(s). The guide polynucleotide sequence may be designed to have complementarity to the target sequence, or identity to the opposing strand of the target sequence. In some embodiments, the guide polynucleotide comprises a spacer sequence that is about 80%, 85%, 90%, 91%, 92%, 93%, 94%, 95%, 96%, 97%, 98% or 99% identical to a protospacer sequence in the target sequence. In particular embodiments, the guide polynucleotide comprises a spacer sequence that is 100% identical to a protospacer sequence in the target sequence.

[0214] In some embodiments, where the DNA-binding domain of an epigenetic editor described herein is a zinc finger array, the target sequence may be recognized by said zinc finger array.

[0215] In some embodiments, where the DNA-binding domain of an epigenetic editor described herein is a TALE, the target sequence may be recognized by said TALE.

[0216] A target sequence described herein may be specific to one copy of a target gene, or may be specific to one allele of a target gene. Accordingly, the epigenetic modification and modulation of expression thereof may be specific to one copy or one allele of the target gene. For example, an epigenetic editor may repress expression of a specific copy harboring a target sequence recognized by the DNA-binding domain (e.g., a copy associated with a disease or condition, or that harbors a mutation associated with a disease or condition).

[0217] In some embodiments, the target B2M genomic region may fall within the sequence shown in SEQ ID NO: 1283 or 1284.

### VI. Epigenetic Modifications

[0218] An epigenetic editor described herein may perform sequence-specific epigenetic modification(s) (e.g., alteration of chemical modification(s)) of a target gene that harbors the target sequence. Such epigenetic modulation may be safer and more easily reversible than modulation due to gene editing, e.g., with generation of DNA double-strand breaks. In some embodiments, the epigenetic modulation may reduce or silence the target gene. In some embodiments, the modification is at a specific site of the target sequence. In some embodiments, the modification is at a specific allele of the target gene. Accordingly, the epigenetic modification may result in modulated (e.g., reduced) expression of one copy of a target gene harboring a specific allele, and not the other copy of the target gene. In some embodiments, the specific allele is associated with a disease, condition, or disorder.

[0219] In some embodiments, the epigenetic modification reduces or abolishes transcription of the target gene harboring the target sequence. In some embodiments, the epigenetic modification reduces or abolishes transcription of a copy of the target gene harboring a specific allele recognized by the epigenetic editor. In some embodiments, the epigenetic editor reduces the level of or eliminates expression of a protein encoded by the target gene. In some embodiments, the epigenetic editor reduces the level of or eliminates expression of a protein encoded by a copy of the target gene harboring a specific allele recognized by the epigenetic editor. The target B2M gene may be epigenetically modified in vitro, ex vivo, or in vivo.

[0220] The effector domain of an epigenetic editor described herein may alter (e.g., deposit or remove) a chemical modification at a nucleotide of the target gene or at a histone associated with the target gene. The chemical modification may be altered at a single nucleotide or a single histone, or may be altered at 2, 3, 4, 5, 6, 7, 8, 9, 10, 11, 12, 13, 14, 15, 16, 17, 18, 19, 20, 30, 40, 50, 60, 70, 80, 90, 100, 200, 300, 400, 500, 600, 700, 800, 900, 1000, 1500, 2000, 2500, 3000 or more nucleotides.

[0221] In some embodiments, an effector domain of an epigenetic editor described herein may alter a CpG dinucleotide within the target gene. In some embodiments, all CpG dinucleotides within 2000, 1500, 1000, 500, or 200 bps flanking a target sequence (e.g., in an alteration site as described herein) are altered according to a modification type described herein, as compared to the original state of the gene or the gene in a comparable cell not contacted with the epigenetic editor. In some embodiments, at least 1, 2, 3, 4, 5, 6, 7, 8, 9, 10, 11, 12, 13, 14, 15, 16, 17, 18, 19, 20, 25, 30, 35, 40, 45, 50, 60, 70, 80, 90, 100, 150, 200, 250, 300, 350, 400, 450, 500, 550, 600, 650, 700 or more of the CpG dinucleotides are altered as compared to the original state of the gene or the gene in a comparable cell not contacted with the epigenetic editor. In some embodiments, at least 5%, 6%, 7%, 8%, 9%, 10%, 15%, 20%, 25%, 30%, 35%, 40%, 45%, 50%, 55%, 60%, 65%, 70%, 75%, 80%, 85%, 90%, 95%, 96%, 97%, 98%, or 99% of the CpG dinucleotides are altered as compared to the original state of the gene or the gene in a comparable cell not contacted with the epigenetic editor. In some embodiments, one single CpG dinucleotide is altered, as compared to the original state of the gene or the gene in a comparable cell not contacted with the epigenetic editor.

[0222] An effector domain of an epigenetic editor described herein may alter a histone modification state of a histone associated with or bound to the target gene. For example, an effector domain may deposit a modification on one or more lysine residues of histone tails of histones associated with the target gene. In some embodiments, the effector domain may result in deacetylation of one or more histone tails of histones associated with the target gene, thereby reducing or silencing expression of the target gene. In some embodiments, the histone modification state is a methylation state. For example, the effector domain may result in a H3K9, H3K27 or H4K20 methylation (e.g. one or more of a H3K9me2, H3K9me3, H3K27me2, H3K27me3, and H4K20me3 methylation) at one or more histone tails associated with the target gene, thereby reducing or silencing expression of the target gene.

[0223] In some embodiments, all histone tails of histones bound to DNA nucleotides within 2000, 1500, 1000, 500, or 200 bps flanking the target sequence are altered according to a modification type as described herein, as compared to the original state of the chromosome or the chromosome in a comparable cell not contacted with the epigenetic editor. In some embodiments, at least 1, 2, 3, 4, 5, 6, 7, 8, 9, 10, 11, 12, 13, 14, 15, 16, 17, 18, 19, 20, 25, 30, 35, 40, 45, 50, 55, 60, 65, 70, 75, 80, 85, 90, 95, 100, 105, 110, 115, 120 or more histone tails of the bound histones are altered as compared to the original state of the chromosome or the chromosome in a comparable cell not contacted with the epigenetic editor. In some embodiments, at least 5%, 6%, 7%, 8%, 9%, 10%, 15%, 20%, 25%, 30%, 35%, 40%, 45%, 50%, 55%, 60%, 65%, 70%, 75%, 80%, 85%, 90%, 95%, 96%, 97%, 98%, or 99% of histone tails of the bound histones are altered as compared to the original state of the chromosome or the chromosome in a comparable cell not contacted with the epigenetic editor. For example, one single histone tail of the bound histones may be altered as compared to the original state of the chromosome or the chromosome in a comparable cell not contacted with the epigenetic editor. As another example, one single bound histone octamer may be altered as compared to the original state of the chromosome or the chromosome in a comparable cell not contacted with the epigenetic editor.

[0224] The chemical modification deposited at target gene DNA nucleotides or histone residues may be at or in close proximity to a target sequence in the target gene. In some embodiments, an effector domain of an epigenetic editor described herein alters a chemical modification state of a nucleotide or histone tail bound to a nucleotide 100-200, 200-300, 300-400, 400-55, 500-600, 600-700, or 700-800 nucleotides 5′ or 3′ to the target sequence in the target gene. In some embodiments, an effector domain alters a chemical modification state of a nucleotide or histone tail bound to a nucleotide within 10, 20, 30, 40, 50, 60, 70, 80, 90, 100, 200, 300, 400, 500, 600, 700, 800, 900, 1000, 1100, 1200, 1300, 1400, 1500, 1600, 1700, 1800, 1900, or 2000 nucleotides flanking the target sequence. As used herein, “flanking” refers to nucleotide positions 5′ to the 5′ end of and 3′ to the 3′ end of a particular sequence, e.g. a target sequence.

[0225] In some embodiments, an effector domain mediates or induces a chemical modification change of a nucleotide or a histone tail bound to a nucleotide distant from a target sequence. Such modification may be initiated near the target sequence, and may subsequently spread to one or more nucleotides in the target gene distant from the target sequence. For example, an effector domain may initiate alteration of a chemical modification state of one or more nucleotides or one or more histone residues bound to one or more nucleotides within 10, 20, 30, 40, 50, 60, 70, 80, 90, 100, 200, 300, 400, 500 nucleotides flanking the target sequence, and the chemical modification state alteration may spread to one or more nucleotides at least 100, 200, 300, 400, 500, 600, 700, 800, 900, 1000, 1100, 1200, 1300, 1400, 1500, 1600, 1700, 1800, 1900, 2000, 2500, 3000, or more nucleotides from the target sequence in the target gene, either upstream or downstream of the target sequence. In certain embodiments, the chemical modification may be initiated at less than 2, 3, 5, 10, 20, 30, 40, 50, or 100 nucleotides in the target gene and spread to at least 100, 200, 300, 400, 500, 600, 700, 800, 900, 1000, 2000, or more nucleotides in the target gene. In some embodiments, the chemical modification spreads to nucleotides in the entire target gene. Additional proteins or transcription factors, for example, transcription repressors, methyltransferases, or transcription regulation scaffold proteins, may be involved in the spreading of the chemical modification. Alternatively, the epigenetic editor alone may be involved.

[0226] In some embodiments, an epigenetic editor described herein reduces expression of a target gene by at least about 20%, at least about 30%, at least about 40%, at least about 50%, at least about 60%, at least about 70%, at least about 80%, at least about 90%, at least about 95%, at least about 99%, or more, as measured by transcription of the target gene in a cell, a tissue, or a subject as compared to a control cell, control tissue, or a control subject (e.g., in the absence of the epigenetic editor). In some embodiments, the epigenetic editors described herein reduces expression of a copy of target gene by at least about 20%, at least about 30%, at least about 40%, at least about 50%, at least about 60%, at least about 70%, at least about 80%, at least about 90%, at least about 95%, at least about 99%, or more, as measured by transcription of the copy of the target gene in a cell, a tissue, or a subject as compared to a control cell, control tissue, or a control subject. In certain embodiments, the copy of the target gene harbors a specific sequence or allele recognized by the epigenetic editor. In particular embodiments, the epigenetically modified copy encodes a functional protein, and accordingly an epigenetic editor disclosed herein may reduce or abolish expression and/or function of the protein. For example, an epigenetic editor described herein may reduce expression and/or function of a protein encoded by the target gene by at least 3-fold, at least 4-fold, at least 5-fold, at least 6-fold, at least 7-fold, at least 8-fold, at least 9-fold, at least 10-fold, at least 11-fold, at least 12-fold, at least 13-fold, at least 14-fold, at least 15-fold, at least 20-fold, at least 25-fold, at least 30-fold, at least 35-fold, at least 40-fold, at least 45-fold, at least 50-fold, at least 60-fold, at least 70-fold, at least 80-fold, at least 90-fold, or at least 100 fold in a cell, a tissue, or a subject as compared to a control cell, control tissue, or a control subject.

[0227] Modulation of target gene expression can be assayed by determining any parameter that is indirectly or directly affected by the expression of the target gene. Such parameters include, e.g., changes in RNA or protein levels; changes in protein activity; changes in product levels; changes in downstream gene expression; changes in transcription or activity of reporter genes such as, for example, luciferase, CAT, beta-galactosidase, or GFP; changes in signal transduction; changes in phosphorylation and dephosphorylation; changes in receptor-ligand interactions; changes in concentrations of second messengers such as, for example, cGMP, CAMP, IP3, and Ca²⁺; changes in cell growth; changes in neovascularization; and/or changes in any functional effect of gene expression. Measurements can be made in vitro, in vivo, and/or ex vivo, and can be made by conventional methods, e.g., measurement of RNA or protein levels, measurement of RNA stability, and/or identification of downstream or reporter gene expression. Readout can be by way of, for example, chemiluminescence, fluorescence, colorimetric reactions, antibody binding, inducible markers, ligand binding assays, changes in intracellular second messengers such as cGMP and inositol triphosphate (IP3), changes in intracellular calcium levels; cytokine release, and the like.

[0228] Methods for determining the expression level of a gene, for example the target of an epigenetic editor, may include, e.g., determining the transcript level of a gene by reverse transcription PCR, quantitative RT-PCR, droplet digital PCR (ddPCR), Northern blot, RNA sequencing, DNA sequencing (e.g., sequencing of complementary deoxyribonucleic acid (cDNA) obtained from RNA); next generation (Next-Gen) sequencing, nanopore sequencing, pyrosequencing, or Nanostring sequencing. Levels of protein expressed from a gene may be determined, e.g., by Western blotting, enzyme linked immuno-absorbance assays, mass-spectrometry, immunohistochemistry, or flow cytometry analysis. Gene expression product levels may be normalized to an internal standard such as total messenger ribonucleic acid (mRNA) or the expression level of a particular gene, e.g., a housekeeping gene.

[0229] In some embodiments, the effect of an epigenetic editor in modulating target gene expression may be examined using a reporter system. For example, an epigenetic editor may be designed to target a reporter gene encoding a reporter protein, such as a fluorescent protein. Expression of the reporter gene in such a model system may be monitored by, e.g., flow cytometry, fluorescence-activated cell sorting (FACS), or fluorescence microscopy. In some embodiments, a population of cells may be transfected with a vector that harbors a reporter gene. The vector may be constructed such that the reporter gene is expressed when the vector transfects a cell. Suitable reporter genes include genes encoding fluorescent proteins, for example green, yellow, cherry, cyan or orange fluorescent proteins. The population of cells carrying the reporter system may be transfected with DNA, mRNA, or vectors encoding the epigenetic editor targeting the reporter gene.

### VII. Epigenetically Modified Cells

[0230] In one aspect, the present disclosure provides cells that have been modified using one or more epigenetic editor(s) described herein. In some embodiments, nucleic acid molecule(s) encoding said epigenetic editor(s) or component(s) thereof are administered to the cells. Any type of cell may be modified as described herein. The cells may be modified in vitro, in vivo, or ex vivo. Cells suitable for modification may be procured from a patient or a healthy donor.

[0231] In some embodiments, the cell is an immune cell. Immune cells may include T cells, B cells, natural killer (NK) cells, dendritic cells, and monocytes/macrophages. In some embodiments, the cell is an alpha/beta T cell. In some embodiments, the cell is a gamma/delta T cell. In some embodiments, the cell is a cytotoxic T cell, e.g., a CD8⁺ cytotoxic T cell. In some embodiments, the cell is a T helper cell, e.g., a CD4⁺ T helper cell. In some embodiments, the cell is a regulatory T cell. In some embodiments, the cell is an NK cell. In some embodiments, the cell is a dendritic cell. In some embodiments, the cell is a macrophage.

[0232] In some embodiments, the cell is a stem cell. A “stem cell” refers to an undifferentiated cell which is capable of indefinitely giving rise to more stem cells of the same type, and from which other specialized cells may arise by differentiation. Adult stem cells are usually multipotent, while induced or embryonic-derived stem cells are pluripotent.

[0233] In some embodiments, the cell is a progenitor cell. A “progenitor cell” refers to a cell which is able to differentiate to form one or more types of cells, but has limited self-renewal in vitro and in vivo.

[0234] In some embodiments, the cell is capable of differentiating into an immune cell described above. The cell may be, for example, an embryonic stem cell (ESC), a hematopoietic stem cell (HSC), a hematopoietic progenitor cell (HPC), or a hematopoietic stem and progenitor cell (HSPC). A “hematopoietic stem and progenitor cell” or “HSPC” refers to a cell which expresses the antigenic marker CD34 (CD34⁺). In particular embodiments, the term “HSPC” refers to a cell identified by the presence of the antigenic marker CD34 (CD34⁺) and the absence of lineage (lin) markers. The population of cells that are CD34⁺ and/or Lin includes hematopoietic stem cells and hematopoietic progenitor cells.

[0235] In some embodiments, the cell is an induced pluripotent stem cell (iPSC) reprogrammed from a somatic cell such as a T cell.

[0236] In some embodiments, the cell is obtained from umbilical cord blood of a healthy donor. In some embodiments, the cell is obtained from adult peripheral blood or mobilized from the bone marrow of a healthy donor.

[0237] In some embodiments, a cell as described above is modified by a method comprising transfecting the cell with a system comprising (a) one or more epigenetic editor(s) described herein, or (b) nucleic acid molecule(s) encoding said epigenetic editor(s). In certain embodiments, the modified cell is a T cell. In some embodiments, the modified T cell expresses one or more epigenetic editor(s) that are able to selectively reduce or silence the expression of one or more target gene(s) in the cell. In particular embodiments, the target gene is B2M. In some embodiments, the T cells are modified ex vivo. The modified T cell may, in some embodiments, further express an engineered TCR or CAR directed against at least one antigen expressed at the surface of a target cell (e.g., a malignant or infected cell). In some embodiments, the modified T cell does not express at least one gene encoding an endogenous TCR component. In particular embodiments, the modified T cells are non-alloreactive. In particular embodiments, the modified T cells are particularly suitable for allogeneic transplantation.

### VIII. Pharmaceutical Compositions

[0238] In one aspect, the present disclosure provides a pharmaceutical composition comprising as an active ingredient (or as the sole active ingredient) one or more epigenetic editors described herein or component(s) (e.g., fusion proteins and/or guide polynucleotides) thereof, or nucleic acid molecule(s) encoding said epigenetic editors or component(s) thereof. For example, a pharmaceutical composition may comprise nucleic acid molecule(s) encoding the fusion protein(s) (and guide polynucleotides, where applicable) of an epigenetic editor described herein. In some embodiments, separate pharmaceutical compositions comprise the fusion protein(s) and the guide polynucleotide(s).

[0239] In one aspect, the present disclosure provides a pharmaceutical composition comprising as an active ingredient (or as the sole active ingredient) cells that have undergone epigenetic modification(s) mediated or induced by (a) one or more epigenetic editor(s) provided herein, e.g., wherein nucleic acid molecule(s) encoding said epigenetic editor(s) were administered to said cells ex vivo.

[0240] Generally, the epigenetic editors described herein or component(s) thereof, nucleic acid molecule(s) encoding said epigenetic editors or component(s) thereof, or cells modified by the epigenetic editors of the present disclosure, are suitable to be administered as a formulation in association with one or more pharmaceutically acceptable excipient(s), e.g., as described below.

[0241] The term “excipient” is used herein to describe any ingredient other than the compound(s) of the present disclosure. The choice of excipient(s) will to a large extent depend on factors such as the particular mode of administration, the effect of the excipient on solubility and stability, and the nature of the dosage form. As used herein, “pharmaceutically acceptable excipient” includes any and all solvents, dispersion media, coatings, antibacterial and antifungal agents, isotonic and absorption delaying agents, and the like that are physiologically compatible. Some examples of pharmaceutically acceptable excipients are water, saline, phosphate buffered saline, dextrose, glycerol, ethanol and the like, as well as combinations thereof. In many cases, it will be preferable to include isotonic agents, for example, sugars, polyalcohols such as mannitol, sorbitol, or sodium chloride in the composition. Additional examples of pharmaceutically acceptable substances are wetting agents or minor amounts of auxiliary substances such as wetting or emulsifying agents, preservatives, or buffers, which enhance the shelf life or effectiveness of the antibody.

[0242] Formulations of a pharmaceutical composition suitable for parenteral administration typically comprise the active ingredient combined with a pharmaceutically acceptable carrier, such as sterile water or sterile isotonic saline. Such formulations may be prepared, packaged, or sold in a form suitable for bolus administration or for continuous administration. The pharmaceutical compositions described herein may be administered to a subject, e.g., subcutaneously, intradermally, intratumorally, intranodally, intramuscularly, intravenously, intralymphatically, or intraperitoneally. In particular embodiments, a pharmaceutical composition of the present disclosure is administered intravenously to the subject.

### IX. Delivery Methods

[0243] In some embodiments, the epigenetic editor or its component(s) are introduced to target cells in the form of nucleic acid molecule(s) encoding the epigenetic editor or its component(s); accordingly, the pharmaceutical compositions herein comprise the nucleic acid molecule(s). Such nucleic acid molecule(s) may be, for example, DNA, RNA, or mRNA, and/or modified nucleic acid sequence(s) (e.g., with chemical modifications, a 5′ cap, or one or more 3′ modifications). In some embodiments, the nucleic acid molecule(s) may be delivered as naked DNA or RNA, for instance by means of transfection or electroporation, or can be conjugated to molecules (e.g., N-acetylgalactosamine) promoting uptake by target cells. In some embodiments, the nucleic acid molecule(s) may be in nucleic acid expression vector(s), which may include expression control sequences such as promoters, enhancers, transcription signal sequences, transcription termination sequences, introns, polyadenylation signals, Kozak consensus sequences, internal ribosome entry sites (IRES), etc. Such expression control sequences are well known in the art. A vector may also comprise a sequence encoding a signal peptide (e.g., for nuclear localization, nucleolar localization, or mitochondrial localization), associated with (e.g., inserted into or fused to) a sequence coding for a protein.

[0244] Examples of vectors include, but are not limited to, plasmid vectors; viral vectors based on vaccinia virus, poliovirus, adenovirus, adeno-associated virus, SV40, herpes simplex virus, human immunodeficiency virus, retrovirus (e.g., Murine Leukemia Virus, or spleen necrosis virus, vectors derived from retroviruses such as Rous Sarcoma Virus, Harvey Sarcoma Virus, avian leukosis virus, a lentivirus, human immunodeficiency virus, myeloproliferative sarcoma virus, and mammary tumor virus); and other recombinant vectors. In certain embodiments, the vector is a plasmid or a viral vector. Viral particles or virus-like particles (VLPs) may also be used to deliver nucleic acid molecule(s) encoding epigenetic editors or component(s) thereof as described herein. For example, “empty” viral particles can be assembled to contain any suitable cargo. Viral vectors and viral particles may also be engineered to incorporate targeting ligands to alter target tissue specificity.

[0245] In certain embodiments, an epigenetic editor as described herein or component(s) thereof are encoded by nucleic acid sequence(s) present in one or more viral vectors, or a suitable capsid protein of any viral vector. Examples of viral vectors include adeno-associated viral vectors (e.g., derived from AAV3, AAV3b, AAV4, AAV5, AAV6, AAV7, AAV8, AAV9, AAVrh8, AAV10, and/or variants thereof); retroviral vectors (e.g., Maloney murine leukemia virus, MML-V), adenoviral vectors (e.g., AD100), lentiviral vectors (e.g., HIV and FIV-based vectors), and herpesvirus vectors (e.g., HSV-2).

[0246] In some embodiments, delivery involves an adeno-associated virus (AAV) vector. AAV vector delivery may be particularly useful where the DNA-binding domain of an epigenetic editor fusion protein is a zinc finger array. Without wishing to be bound by any theory, the smaller size of zinc finger arrays compared to larger DNA-binding domains such as Cas protein domains may allow such a fusion protein to be conveniently packed in viral vectors such as an AAV vector.

[0247] Any AAV serotype, e.g., human AAV serotype, can be used for an AAV vector as described herein, including, but not limited to, AAV serotype 1 (AAV1), AAV serotype 2 (AAV2), AAV serotype 3 (AAV3), AAV serotype 4 (AAV4), AAV serotype 5 (AAV5), AAV serotype 6 (AAV6), AAV serotype 7 (AAV7), AAV serotype 8 (AAV8), AAV serotype 9 (AAV9), AAV serotype 10 (AAV10), and AAV serotype 11 (AAV11), as well as variants thereof. In some embodiments, an AAV variant has at least 90%, 91%, 92%, 93%, 94%, 95%, 96%, 97%, 98%, or 99% amino acid sequence identity to a wildtype AAV. In certain embodiments, the AAV variant may be engineered such that its capsid proteins have reduced immunogenicity or enhanced transduction ability in humans. In some instances, one or more regions of at least two different AAV serotype viruses are shuffled and reassembled to generate a chimeric variant. For example, a chimeric AAV may comprise inverted terminal repeats (ITRs) that are of a heterologous serotype compared to the serotype of the capsid. The resulting chimeric AAV can have a different antigenic reactivity or recognition compared to its parental serotypes. In some embodiments, a chimeric variant of an AAV includes amino acid sequences from 2, 3, 4, 5, or more different AAV serotypes.

[0248] Non-viral systems are also contemplated for delivery as described herein. Non-viral systems include, but are not limited to, nucleic acid transfection methods including electroporation, sonoporation, calcium phosphate transfection, microinjection, DNA biolistics, lipid-mediated transfection, transfection through heat shock, compacted DNA-mediated transfection, lipofection, cationic agent-mediated transfection, and transfection with liposomes, immunoliposomes, exosomes, or cationic facial amphiphiles (CFAs). In certain embodiments, one or more mRNAs encoding epigenetic editor fusion proteins as described herein may be co-electroporated with one or more guide polynucleotides (e.g., gRNAs) as described herein. One important category of non-viral nucleic acid vectors is nanoparticles, which can be organic (e.g., lipid) or inorganic (e.g., gold). For instance, organic (e.g. lipid and/or polymer) nanoparticles can be suitable for use as delivery vehicles in certain embodiments of this disclosure.

[0249] In some embodiments, delivery is accomplished using a lipid nanoparticle (LNP). LNP compositions are typically sized on the order of micrometers or smaller and may include a lipid bilayer. In some embodiments, an LNP refers to any particle that has a diameter of less than 1000 nm, 500 nm, 250 nm, 200 nm, 150 nm, 100 nm, 75 nm, 50 nm, or 25 nm. In some embodiments, a nanoparticle may range in size from 1-1000 nm, 1-500 nm, 1-250 nm, 25-200 nm, 25-100 nm, 35-75 nm, or 25-60 nm. Nanoparticle compositions encompass lipid nanoparticles (LNPs), liposomes (e.g., lipid vesicles), and lipoplexes.

[0250] An LNP as described herein may be made from cationic, anionic, or neutral lipids. In some embodiments, an LNP may comprise neutral lipids, such as the fusogenic phospholipid 1,2-Dioleoyl-sn-glycero-3-phosphoethanolamine (DOPE) or the membrane component cholesterol, as helper lipids to enhance transfection activity and nanoparticle stability. In some embodiments, an LNP may comprise hydrophobic lipids, hydrophilic lipids, or both hydrophobic and hydrophilic lipids. Any lipid or combination of lipids that are known in the art can be used to produce an LNP. The lipids may be combined in any molar ratios to produce the LNP. In some embodiments, the LNP is a T cell-targeting (e.g., preferentially or specifically targeting the T cell) LNP.

### X. Therapeutic Uses of Epigenetic Editors and Modified Cells

[0251] The present disclosure also provides methods for treating or preventing a condition in a subject, comprising administering to the subject a) one or more epigenetic editor(s) as described herein, b) nucleic acid molecule(s) encoding the epigenetic editor(s), c) cells modified by the epigenetic editor(s), or d) pharmaceutical compositions comprising any of a)-c).

[0252] In one aspect, the epigenetic editor may effect an epigenetic modification of a target polynucleotide sequence in a target gene associated with a disease, condition, or disorder in the subject, thereby modulating expression of the target gene to treat or prevent the disease, condition, or disorder. In some embodiments, the epigenetic editor reduces the expression of the target gene to an extent sufficient to achieve a desired effect, e.g., a therapeutically relevant effect such as the prevention or treatment of the disease, condition, or disorder.

[0253] In one aspect, a cell (e.g., an allogeneic cell) modified by one or more epigenetic editor(s) of the present disclosure may be administered as a medicament to a subject with a disease, condition, or disorder, thereby treating the disease, condition, or disorder. In some embodiments, the subject is administered allogeneic T cells which have been epigenetically modified as described herein, e.g., to have reduced or silenced B2M expression. In some embodiments, the modified T cells further express an engineered TCR or CAR directed against at least one antigen expressed at the surface of a target cell (e.g., a malignant or infected cell). In some embodiments, the modified T cells do not express at least one gene encoding an endogenous TCR component.

[0254] In some embodiments, the subject may be a mammal, e.g., a human. In some embodiments, the subject is selected from a non-human primate such as chimpanzee, cynomolgus monkey, or macaque, and other ape and monkey species.

### XI. Definitions

[0255] The term “nucleic acid” as used herein refers to any oligonucleotide or polynucleotide containing nucleotides (e.g., deoxyribonucleotides or ribonucleotides) in either single- or double-strand form, and includes DNA and RNA. “Nucleotides” contain a sugar deoxyribose (DNA) or ribose (RNA), a base, and a phosphate group, and are linked together through the phosphate groups. “Bases” include purines and pyrimidines, which include natural compounds such as adenine, thymine, guanine, cytosine, uracil, inosine, and natural analogs; as well as synthetic derivatives of purines and pyrimidines, which include, but are not limited to, modified versions which place new reactive groups such as amines, alcohols, thiols, carboxylates, alkylhalides, etc. Nucleic acids may contain known nucleotide analogs and/or modified backbone residues or linkages, which may be synthetic, naturally occurring, and non-naturally occurring. Such nucleotide analogs, modified residues, and modified linkages are well known in the art, and may provide a nucleic acid molecule with enhanced cellular uptake, reduced immunogenicity, and/or increased stability in the presence of nucleases.

[0256] As used herein, an “isolated” or “purified” nucleic acid molecule is a nucleic acid molecule that exists apart from its native environment. For example, an “isolated” or “purified” nucleic acid molecule (1) has been separated away from the nucleic acids of the genomic DNA or cellular RNA of its source of origin; and/or (2) does not occur in nature. In some embodiments, an “isolated” or “purified” nucleic acid molecule is a recombinant nucleic acid molecule.

[0257] It will be understood that in addition to the specific proteins and nucleic acid molecules mentioned herein, the present disclosure also contemplates the use of variants, derivatives, homologs, and fragments thereof. A variant of any given sequence may have the specific sequence of residues (whether amino acid or nucleic acid residues) modified in such a manner that the polypeptide or polynucleotide in question substantially retains at least one of its endogenous functions. A variant sequence can be obtained by addition, deletion, substitution, modification, replacement and/or variation of at least one residue present in the naturally-occurring sequence (in some embodiments, no more than 1, 2, 3, 4, 5, 6, 7, 8, 9, 10, 15, or 20 residues). For specific proteins described herein (e.g., KRAB, dCas9, DNMT3A, and DNMT3L proteins described herein), the present disclosure also contemplates any of the protein's naturally occurring forms, or variants or homologs that retain at least one of its endogenous functions (e.g., at least 50%, 60%, 70%, 80%, 90%, 85%, 96%, 97%, 98%, or 99% of its function as compared to the specific protein described).

[0258] As used herein, a homologue of any polypeptide or nucleic acid sequence contemplated herein includes sequences having a certain homology with the wildtype amino acid and nucleic sequence. A homologous sequence may include a sequence, e.g. an amino acid sequence which may be at least 50%, 55%, 65%, 75%, 85%, 90%, 91%, 92%<93%, 94%, 95%, 96%, 97%, 98%, or 99% identical to the subject sequence. The term “percent identical” in the context of amino acid or nucleotide sequences refers to the percent of residues in two sequences that are the same when aligned for maximum correspondence. In some embodiments, the length of a reference sequence aligned for comparison purposes is at least 30%, (e.g., at least 40, 50, 60, 70, 80, or 90%, or 100%) of the reference sequence. Sequence identity may be measured using sequence analysis software (for example, Sequence Analysis Software Package of the Genetics Computer Group, University of Wisconsin Biotechnology Center, 1710 University Avenue, Madison, Wis. 53705, BLAST, BESTFIT, GAP, or PILEUP/PRETTYBOX programs). Such software matches identical or similar sequences by assigning degrees of homology to various substitutions, deletions, and/or other modifications. In an exemplary approach to determining the degree of identity, a BLAST program may be used, with a probability score between e-3 and e-100 indicating a closely related sequence.

[0259] The percent identity of two nucleotide or polypeptide sequences is determined by, e.g., BLAST® using default parameters (available at the U.S. National Library of Medicine's National Center for Biotechnology Information website). In some embodiments, the length of a reference sequence aligned for comparison purposes is at least 30%, (e.g., at least 40, 50, 60, 70, 80, or 90%) of the reference sequence.

[0260] It will be understood that the numbering of the specific positions or residues in polypeptide sequences depends on the particular protein and numbering scheme used. Numbering might be different, e.g., in precursors of a mature protein and the mature protein itself, and differences in sequences from species to species may affect numbering. One of skill in the art will be able to identify the respective residue in any homologous protein and in the respective encoding nucleic acid by methods well known in the art, e.g., by sequence alignment and determination of homologous residues.

[0261] The term “modulate” or “alter” refers to a change in the quantity, degree, or extent of a function. For example, an epigenetic editor as described herein may modulate the activity of a promoter sequence by binding to a motif within the promoter, thereby inducing, enhancing, or suppressing transcription of a gene operatively linked to the promoter sequence. As other examples, an epigenetic editor as described herein may block RNA polymerase from transcribing a gene, or may inhibit translation of an mRNA transcript. The terms “inhibit,” “repress,” “suppress,” “silence” and the like, when used in reference to an epigenetic editor or a component thereof as described herein, refers to decreasing or preventing the activity (e.g., transcription) of a nucleic acid sequence (e.g., a target gene) or protein relative to the activity of the nucleic acid sequence or protein in the absence of the epigenetic editor or component thereof. The term may include partially or totally blocking activity, or preventing or delaying activity. The inhibited activity may be, e.g., 10%, 20%, 30%, 40%, 50%, 60%, 70%, 75%, 80%, 85%, 90%, 91%, 92%, 93%, 94%, 95%, 96%, 97%, 98%, or 99% less than that of a control, or may be, e.g., at least 1.5-fold, 2-fold, 3-fold, 4-fold, 5-fold, or 10-fold less than that of a control.

[0262] The term “about” or “approximately” means within an acceptable error range for the particular value as determined by one of ordinary skill in the art, which will depend in part on how the value is measured or determined, e.g., the limitations of the measurement system. For example, “about” can mean within one or more than one standard deviation, per the practice in the given value. Where particular values are described in the application and claims, unless otherwise stated, the term “about” should be assumed to mean an acceptable error range for the particular value.

[0263] Ranges provided herein are understood to be shorthand for all of the values within the range. For example, a range of 1 to 50 is understood to include any number, combination of numbers, or sub-range from the group consisting of 1, 2, 3, 4, 5, 6, 7, 8, 9, 10, 11, 12, 13, 14, 15, 16, 17, 18, 19, 20, 21, 22, 23, 24, 25, 26, 27, 28, 29, 30, 31, 32, 33, 34, 35, 36, 37, 38, 39, 40, 41, 42, 43, 44, 45, 46, 47, 48, 49, or 50, as well as all intervening decimal values between the aforementioned integers such as, for example, 1.1, 1.2, 1.3, 1.4, 1.5, 1.6, 1.7, 1.8, and 1.9. With respect to sub-ranges, “nested sub-ranges” that extend from either end point of the range are specifically contemplated. For example, a nested sub-range of an exemplary range of 1 to 50 may comprise 1 to 10, 1 to 20, 1 to 30, and 1 to 40 in one direction, or 50 to 40, 50 to 30, 50 to 20, and 50 to 10 in the other direction.

[0264] Unless otherwise defined herein, scientific and technical terms used in connection with the present disclosure shall have the meanings that are commonly understood by those of ordinary skill in the art. Exemplary methods and materials are described below, although methods and materials similar or equivalent to those described herein can also be used in the practice or testing of the present disclosure. In case of conflict, the present specification, including definitions, will control. Further, unless otherwise required by context, singular terms shall include pluralities and plural terms shall include the singular. Throughout this specification and embodiments, the words “have” and “comprise,” or variations such as “has,” “having,” “comprises,” or “comprising,” will be understood to imply the inclusion of a stated integer or group of integers but not the exclusion of any other integer or group of integers. Unless otherwise indicated, the recitation of a listing of elements herein includes any of the elements singly or in any combination. The recitation of an embodiment herein includes that embodiment as a single embodiment, or in combination with any other embodiment(s) herein. All publications, patents, patent applications, and other references mentioned herein are incorporated by reference in their entirety. To the extent that references incorporated by reference contradict the disclosure contained in the specification, the specification is intended to supersede and/or take precedence over any such contradictory material. Although a number of documents are cited herein, this citation does not constitute an admission that any of these documents forms part of the common general knowledge in the art.

[0265] According to the present disclosure, back-references in the dependent claims are meant as short-hand writing for a direct and unambiguous disclosure of each and every combination of claims that is indicated by the back-reference. Further, headers herein are created for ease of organization and are not intended to limit the scope of the claimed invention in any manner.

[0266] In order that the present disclosure may be better understood, the following examples are set forth. These examples are for purposes of illustration only and are not to be construed as limiting the scope of the present disclosure in any manner.

### EXAMPLES

### Example 1: Fusion Protein Design and Synthesis

[0267] A fusion protein comprising dCas9, DNMT3A, DNMT3L, and KOX1 KRAB (“CRISPR-off”) was produced. From N terminus to C terminus, the protein had the following functional domains and linkers: huDNMT3A-linker-huDNMT3L-XTEN80-NLS-dSpCas9-NLS-XTEN16-huKOX1 KRAB (SEQ ID NO: 658). The CRISPR-off plasmid construct is described in Nuñez et al., Cell (2021) 184 (9): 2503-19.

[0268] ZF fusion proteins (“ZF-off”) comprising DNMT3A, 3L, and KOX1 KRAB were also produced. These fusion proteins had the following general structure: huDNMT3A-linker-huDNMT3L-XTEN80-NLS-ZFP domain-NLS-XTEN16-huKOX1 KRAB (SEQ ID NO: 659).

### Example 2: Selection of B2M Regions for gRNA Targeting

[0269] gRNAs targeting genomic regions within 1 kb of the TSS of the human B2M gene were computationally designed using the Benchling gRNA platform for human (GRCh38). gRNAs containing poly-TTTT sequences were first discarded. gRNA off-target analysis using CasOFFinder (Bae et al., Bioinformatics (2014) 30 (10): 1473-5) was performed. gRNAs were discarded if they matched to multiple locations across the target genome.

[0270] A final set of 258 gRNA sequences was selected for the primary screen in GripTite™ HEK 293 cells. DNA plasmids containing coding sequences for the gRNAs under the control of a U6 promoter were ordered from a vendor.

### Example 3: Selection of ZFP Target Sites and Design of ZFPs

[0271] A library of two-finger ZFPs (2F units), each recognizing 6 bp DNA sites, was used to design larger six-finger ZFP arrays targeting 18 bp DNA binding sites. The source of the 2F units was a set of three-finger zinc finger proteins that had been selected to bind specific target sites using a bacterial-2-hybrid (B2H) selection system (Hurt et al., PNAS (2003) 100:12271-6; Maeder et al., Mol Cell (2008) 31 (2): 294-301). A list of targetable DNA sites was created by generating all possible triplet combinations of 6 bp binding sites represented in the library and allowing either 0 or 1 bp between the 6 bp target sites. To identify ZF target sites within human B2M, the sequence within 1 kb of the TSS (human (GRCh38)) was interrogated against this list.

[0272] For each identified ZF target site, multiple ZF proteins could be designed. Design of the six recognition helices used to generate the full proteins was performed by selecting 2F units and taking into account factors such as known binding preferences of zinc finger proteins, the frequency with which amino acids in positions-1, 2, 3 and 6 had been selected in the B2H selection system to bind the desired target base, avoidance of amino acids in positions-1, 2, 3 and 6 that had been selected to bind multiple different bases in the B2H, and maintenance of context dependencies by matching flanking bases where possible. The full ZF sequence was derived from the naturally occurring Zif268 protein and selected recognition helices were maintained in the sequence context in which they were selected in the B2H (either fingers 1-2 or fingers 2-3 from Zif268).

[0273] 2F units were joined by the linker TGSQKP (SEQ ID NO: 651) where 6 bp binding sites were contiguous and by the linker TGGGGSQKP (SEQ ID NO: 652) where 1 bp separated the 6 bp binding sites. A final set of 280 ZFPs targeting 41 distinct DNA regions within 1 kb of the B2M TSS (chr15:44711517) with no other exact matches in the genome (GRCh38) were selected for the primary screen (Table 1).

### Example 4: Guide RNA Screening in GripTite™ HEK 293 MSR Cells

[0274] This Example describes a study in which gRNAs were screened for their efficacy in targeting B2M in HEK 293 cells (human embryonic kidney cells).

Introduction of gRNA+CRISPR-Off to HEK 293 Cells

[0275] Six 96-well plates (Sigma-Aldrich) were seeded with 20,000 GripTite™ 293 MSR cells per well (Thermo Fisher, Cat. No. R79507) in appropriate cell culture media. These cells were derived from human embryonic kidney cells (HEK293). Cells were allowed to grow for 24 hours following plating in a 37° C. incubator at 5% CO₂. 25 ng gRNA-coding DNA fragments and 50 ng CRISPR-off-coding plasmid were resuspended in DPBS buffer (Thermo Fisher, Cat. No. 14190144). Additionally, 10 ng of EF1a:Puromycin Resistance plasmid (PLA015) was also added to the transfection mix to achieve a total payload of 85 ng of DNA.

[0276] Transfection mixtures were created by adding resuspended components to Mirus TransIT®-LT1 Transfection Reagent (Mirus, Cat. No. MIR2300). Transfection mixtures were added in duplicate across a total of six screening plates. Wildtype (WT) CRISPR Cas9 with two different TSS-adjacent gRNAs (positive controls), CRISPR-off without gRNA (negative control), CRISPR-off with a non-B2M locus targeting gRNA (negative control), and empty vector only (negative control) were also part of this experiment. Cells were passed twice weekly by treatment with trypsin and Versene prior to splitting into fresh media in a new culture plate.

### β2M Flow Cytometry

[0277] On days 6, 13, and 20 post-transfection, transfected GripTite™ 293 MSR cells were treated with trypsin and Versene and washed with PBS containing 2% FBS. The cells were then stained at 4° C. for 20 minutes with PE-conjugated anti-human β2M antibody (BioLegend, Cat. No. 395704) at a 1:300 dilution and Zombie Violet Fixable Viability Dye (BioLegend, Cat. No. 423113), previously prepared according to manufacturer's recommendations, at a 1:1000 dilution in PBS with 2% FBS. The stained cells were washed and incubated in Fixation Buffer (BioLegend, Cat. No. 420801) for 20 minutes. The cells were then washed prior to acquisition on an Agilent Novocyte Penteon flow cytometer, which could collect up to 20,000 live-cell events per well. Screening conditions were compared to negative (no gRNA) control expression levels to assess % silencing.

### Results

[0278] The relative B2M expression levels in cells transfected with one of the 258 tested gRNAs are shown in FIG. 1 and in Table 8. The top performing B2M gRNAs are indicated as “Yes” selections in FIG. 1, along with quantification of B2M expression in no-gRNA control experiments. A smoothed fit of the entire screen demonstrates a pattern of effective gRNA silencing centered on the TSS of B2M as shown in FIG. 1.

[0279] Robust silencing of the B2M gene, causing reduced expression of B2M, and an observation of only 30-40% β2M-positive cells, was observed after treatment with a number of gRNA candidates.

TABLE 8
Targeting Domain Sequences of Top Performing gRNAs Targeting B2M

| | | | | | Start |
|---|---|---|---|---|---|
| gRNA | gRNA Targeting | SEQ | TSS | % | Nucleotide |
| number | Sequence (5′-3′) | ID NO | Distance (bp) | B2M pos. | on Chr15 |
| gRNA246 | CGGCUCUGCUUCCCUUAGAC | 986 | 570 | 29.6 | 44712088 |
| gRNA146 | UCUCCUUGGUGGCCCGCCGU | 886 | 198 | 30.2 | 44711716 |
| gRNA083 | CUCAUUCUAGGACUUCAGGC | 823 | −278 | 30.4 | 44711262 |
| gRNA119 | GGGCACGCGUUUAAUAUAAG | 859 | −43 | 31.1 | 44711475 |
| gRNA242 | CGCAGCAGACAGGCUUACCC | 982 | 549 | 31.6 | 44712089 |
| gRNA177 | CGCGCGCUACUUGCCCCUUU | 917 | 293 | 31.9 | 44711811 |
| gRNA154 | CCGUGGGGCUAGUCCAGGGC | 894 | 214 | 32.2 | 44711732 |
| gRNA247 | UCCCUUAGACUGGAGAGCUG | 987 | 580 | 32.8 | 44712098 |
| gRNA197 | GAGGGUCGGGACAAAGUUUA | 937 | 352 | 33.5 | 44711870 |
| gRNA249 | GUCCACAGCUCUCCAGUCUA | 989 | 582 | 34.1 | 44712122 |
| gRNA196 | GGAGGGUCGGGACAAAGUUU | 936 | 351 | 34.2 | 44711869 |
| gRNA105 | GCAGUGCCAGGUUAGAGAGA | 845 | −119 | 34.5 | 44711421 |
| gRNA271 | GGCCACGGAGCGAGACAUCU | 1736 | 24 | 34.6 | 44711545 |
| gRNA245 | GAAGCAGAGCCGCAGCAGAC | 985 | 559 | 35.3 | 44712099 |
| gRNA248 | UCCACAGCUCUCCAGUCUAA | 988 | 581 | 35.4 | 44712121 |
| gRNA013 | UCCUGAAGCUGACAGCAUUC | 753 | 1 | 35.7 | 44711519 |
| gRNA223 | GACGGGUAGGCUCGUCCCAA | 963 | 468 | 36 | 44711986 |
| gRNA125 | AGGGUAGGAGAGACUCACGC | 865 | 91 | 36.4 | 44711631 |
| gRNA176 | GGGGCAAGUAGCGCGCGUCC | 916 | 287 | 36.4 | 44711827 |
| gRNA214 | UCCCCCAGCGCAGCUGGAGU | 954 | 444 | 36.7 | 44711962 |
| gRNA262 | CUAUGUGGGGCCACACCGUG | 1002 | 651 | 36.7 | 44712169 |
| gRNA137 | GGAGCGAGAGAGCACAGCGA | 877 | 155 | 36.9 | 44711695 |
| gRNA189 | GACCUUUGGCCUACGGCGAC | 929 | 330 | 37.2 | 44711848 |
| gRNA139 | AACUUGGAGAAGGGAAGUCA | 879 | 176 | 37.4 | 44711716 |
| gRNA224 | GUAGGCUCGUCCCAAAGGCG | 964 | 473 | 37.6 | 44711991 |
| gRNA003 | GAAAGUCCCUCUCUCUAACC | 743 | −125 | 38 | 44711393 |
| gRNA015 | GAGUAGCGCGAGCACAGCUA | 755 | 45 | 38 | 44711585 |
| gRNA011 | AAGUGGAGGCGUCGCGCUGG | 751 | −26 | 38.1 | 44711492 |
| gRNA129 | GGGAGAGGAAGGACCAGAGC | 869 | 114 | 38.1 | 44711654 |
| gRNA140 | UCCCUUCUCCAAGUUCUCCU | 880 | 184 | 38.1 | 44711702 |
| gRNA162 | UGGAUCUCGGGGAAGCGGCG | 902 | 234 | 38.2 | 44711752 |
| gRNA006 | CGCGAGCACAGCUAAGGCCA | 746 | 39 | 38.5 | 44711579 |
| gRNA007 | ACUCUCUCUUUCUGGCCUGG | 747 | 64 | 38.8 | 44711582 |
| gRNA122 | GGCCGAGAUGUCUCGCUCCG | 862 | 22 | 38.8 | 44711540 |
| gRNA231 | AGGUUUGUGAACGCGUGGAG | 971 | 501 | 38.8 | 44712019 |
| gRNA016 | ACUCACGCUGGAUAGCCUCC | 756 | 79 | 39.2 | 44711619 |
| gRNA238 | GAGGGGCGCUUGGGGUCUGG | 978 | 518 | 39.2 | 44712036 |
| gRNA192 | UUUGGCCUACGGCGACGGGA | 932 | 334 | 39.5 | 44711852 |
| gRNA230 | GAGGUUUGUGAACGCGUGGA | 970 | 500 | 39.6 | 44712018 |
| gRNA147 | CUCCUUGGUGGCCCGCCGUG | 887 | 199 | 39.7 | 44711717 |
| gRNA106 | CGCAGUGCCAGGUUAGAGAG | 846 | −118 | 39.9 | 44711422 |
| gRNA161 | CUGGAUCUCGGGGAAGCGGC | 901 | 233 | 40 | 44711751 |
| gRNA244 | CCGGGUAAGCCUGUCUGCUG | 984 | 550 | 40 | 44712068 |
| gRNA265 | CGCGUGCUGUUUCCUCCCCA | 1005 | 666 | 40 | 44712206 |
| gRNA130 | CGGGAGAGGAAGGACCAGAG | 870 | 115 | 40.2 | 44711655 |
| gRNA252 | GCUAGGACAUGCGAACUUAG | 992 | 618 | 40.2 | 44712158 |
| gRNA175 | GGGCAAGUAGCGCGCGUCCC | 915 | 286 | 40.3 | 44711826 |
| gRNA141 | ACCAAGGAGAACUUGGAGAA | 881 | 185 | 40.4 | 44711725 |
| gRNA018 | GCACCCCCUUCCCCACUCCC | 758 | 260 | 40.5 | 44711800 |
| gRNA120 | UAUAAGUGGAGGCGUCGCGC | 860 | −29 | 40.8 | 44711489 |
| gRNA131 | CAGAGGGUGCAGAGCGGGAG | 871 | 129 | 41 | 44711669 |
| gRNA135 | AGCACAGCGAGGGCCACAGA | 875 | 145 | 41 | 44711685 |
| gRNA008 | GAGGAAGGACCAGAGCGGGA | 710 | 110 | 41.1 | 44711650 |
| gRNA171 | GUGGCCUGGGAGUGGGGAAG | 911 | 256 | 41.2 | 44711774 |
| gRNA250 | GAGAGCUGUGGACUUCGUCU | 990 | 592 | 41.2 | 44712110 |
| gRNA260 | GUCUAUGUGGGGCCACACCG | 1000 | 649 | 41.2 | 44712167 |
| gRNA132 | CUCCCGCUCUGCACCCUCUG | 872 | 132 | 41.4 | 44711650 |
| gRNA136 | GAGCACAGCGAGGGCCACAG | 876 | 146 | 41.4 | 44711686 |
| gRNA254 | UCGCAUGUCCUAGCACCUCU | 994 | 627 | 41.6 | 44712145 |
| gRNA216 | CCCCCAGCGCAGCUGGAGUG | 956 | 445 | 41.7 | 44711963 |
| gRNA259 | GUGGCCCCACAUAGACCCAG | 999 | 642 | 41.7 | 44712182 |
| gRNA126 | UCUCUCCUACCCUCCCGCUC | 866 | 101 | 42 | 44711619 |
| gRNA144 | GCGGGCCACCAAGGAGAACU | 884 | 192 | 42.2 | 44711732 |
| gRNA102 | CAUCACGAGACUCUAAGAAA | 842 | −161 | 42.3 | 44711357 |
| gRNA104 | AAGAAAAGGAAACUGAAAAC | 844 | −147 | 42.3 | 44711371 |
| gRNA205 | GAGAAACCCUCCCCCAACCU | 945 | 395 | 42.3 | 44711935 |
| gRNA267 | UGCUUGGCUGUGAUACAAAG | 1007 | 701 | 42.3 | 44712219 |
| gRNA195 | CCUACGGCGACGGGAGGGUC | 935 | 339 | 42.4 | 44711857 |
| gRNA170 | GGUGGCCUGGGAGUGGGGAA | 910 | 255 | 42.5 | 44711773 |
| gRNA264 | GCUGUUUCCUCCCCACGGUG | 1004 | 661 | 42.7 | 44712201 |
| gRNA222 | AGCUGGAGUGGGGGACGGGU | 962 | 455 | 43.2 | 44711973 |
| gRNA138 | CGGAGCGAGAGAGCACAGCG | 878 | 156 | 43.5 | 44711696 |
| gRNA258 | AGCACCUCUGGGUCUAUGUG | 998 | 638 | 43.6 | 44712156 |
| gRNA174 | GGGGAAGGGGGUGCGCACCC | 914 | 269 | 43.7 | 44711787 |
| gRNA090 | GCGCCCCAGCUUGGGACACC | 830 | −253 | 43.8 | 44711287 |
| gRNA261 | UCUAUGUGGGGCCACACCGU | 1001 | 650 | 44.1 | 44712168 |
| gRNA014 | GGCCACGGAGCGAGACAUCU | 754 | 24 | 44.3 | 44711564 |
| gRNA160 | GCUGGAUCUCGGGGAAGCGG | 900 | 232 | 44.3 | 44711750 |
| gRNA078 | GGGCCAGUCUGCAAAGCGAG | 818 | −318 | 44.7 | 44711200 |
| gRNA155 | GCUAGUCCAGGGCUGGAUCU | 895 | 221 | 44.7 | 44711739 |
| gRNA172 | UGGCCUGGGAGUGGGGAAGG | 912 | 257 | 44.7 | 44711775 |
| gRNA251 | CUAGGACAUGCGAACUUAGC | 991 | 617 | 44.7 | 44712157 |
| gRNA005 | GCCCGAAUGCUGUCAGCUUC | 745 | 2 | 44.8 | 44711542 |
| gRNA088 | AGCGCCCGGUGUCCCAAGCU | 828 | −257 | 44.8 | 44711261 |
| gRNA086 | GGACACCGGGCGCUCAUUCU | 826 | −266 | 45.2 | 44711274 |
| gRNA241 | GUCUGGGGGAGGCGUCGCCC | 981 | 532 | 45.5 | 44712050 |
| gRNA145 | UUCUCCUUGGUGGCCCGCCG | 885 | 197 | 45.6 | 44711715 |
| gRNA084 | GGCGCUCAUUCUAGGACUUC | 824 | −274 | 45.8 | 44711266 |
| gRNA009 | GGGCCUUGUCCUGAUUGGCU | 749 | −63 | 45.9 | 44711455 |
| gRNA128 | AGAGGAAGGACCAGAGCGGG | 868 | 111 | 45.9 | 44711651 |
| gRNA272 | GAGUAGCGCGAGCACAGCUA | 1737 | 45 | 46.1 | 44711562 |
| gRNA079 | GGCCAGUCUGCAAAGCGAGG | 819 | −317 | 46.2 | 44711201 |
| gRNA157 | UAGUCCAGGGCUGGAUCUCG | 897 | 223 | 46.2 | 44711741 |
| gRNA186 | CGGGGAGCAGGGGAGACCUU | 926 | 316 | 46.2 | 44711834 |
| gRNA263 | UGUGGGGCCACACCGUGGGG | 1003 | 654 | 46.3 | 44712172 |
| gRNA127 | AAGGACCAGAGCGGGAGGGU | 867 | 106 | 46.4 | 44711646 |
| gRNA163 | AUCUCGGGGAAGCGGCGGGG | 903 | 237 | 46.8 | 44711755 |
| gRNA193 | GCCUACGGCGACGGGAGGGU | 933 | 338 | 46.8 | 44711856 |
| gRNA257 | UAGCACCUCUGGGUCUAUGU | 997 | 637 | 46.9 | 44712155 |
| gRNA100 | AAGAAGGCAUGCACUAGACU | 840 | −187 | 47.4 | 44711353 |
| gRNA184 | UCCCCUGCUCCCCGCCGAAA | 924 | 307 | 47.4 | 44711847 |
| gRNA012 | UUCCUGAAGCUGACAGCAUU | 752 | 0 | 47.5 | 44711518 |
| gRNA010 | CACGCGUUUAAUAUAAGUGG | 750 | −40 | 47.6 | 44711478 |
| gRNA225 | GUCCCAAAGGCGCGGCGCUG | 965 | 481 | 47.7 | 44711999 |
| gRNA201 | GCGUCAGAGCGCCGAGGUUG | 941 | 384 | 47.9 | 44711902 |
| gRNA002 | GAGUCUCGUGAUGUUUAAGA | 742 | −171 | 48.2 | 44711369 |
| gRNA200 | AGCGUCAGAGCGCCGAGGUU | 940 | 383 | 48.5 | 44711901 |
| gRNA243 | CCGCAGCAGACAGGCUUACC | 983 | 550 | 48.6 | 44712090 |
| gRNA081 | UUCAGGCUGGAGGCACAUUA | 821 | −291 | 48.7 | 44711249 |
| gRNA142 | CACCAAGGAGAACUUGGAGA | 882 | 186 | 48.7 | 44711726 |
| gRNA072 | GAUGCUAAGUGACUUGCUAA | 812 | −345 | 48.8 | 44711195 |
| gRNA266 | CGCGACGUUUGUAGAAUGCU | 1006 | 685 | 48.8 | 44712203 |
| gRNA091 | CGCGCCCCAGCUUGGGACAC | 831 | −252 | 49.2 | 44711288 |
| gRNA080 | UGCCCCCUCGCUUUGCAGAC | 820 | −315 | 49.4 | 44711225 |
| gRNA159 | AGGGCUGGAUCUCGGGGAAG | 899 | 229 | 49.5 | 44711747 |
| gRNA075 | CAAGUCACUUAGCAUCUCUG | 815 | −338 | 49.6 | 44711180 |
| gRNA158 | GCUUCCCCGAGAUCCAGCCC | 898 | 227 | 50 | 44711767 |
| gRNA221 | AGCGCAGCUGGAGUGGGGGA | 961 | 450 | 50 | 44711968 |
| gRNA077 | GGGGCCAGUCUGCAAAGCGA | 817 | −319 | 50.1 | 44711199 |
| gRNA156 | CUAGUCCAGGGCUGGAUCUC | 896 | 222 | 50.2 | 44711740 |
| gRNA076 | UGGGGCCAGUCUGCAAAGCG | 816 | −320 | 50.4 | 44711198 |
| gRNA199 | AAGCGUCAGAGCGCCGAGGU | 939 | 382 | 50.4 | 44711900 |
| gRNA256 | CUAGCACCUCUGGGUCUAUG | 996 | 636 | 50.4 | 44712154 |
| gRNA143 | CUUCUCCAAGUUCUCCUUGG | 883 | 187 | 50.6 | 44711705 |
| gRNA202 | CGUCAGAGCGCCGAGGUUGG | 942 | 385 | 50.7 | 44711903 |
| gRNA099 | UGAGUUUGCUGUCUGUACAU | 839 | −210 | 50.8 | 44711330 |
| gRNA053 | UCCUGAGGACAGCUCAGAGA | 793 | −545 | 51 | 44710995 |
| gRNA237 | GGAGGGGCGCUUGGGGUCUG | 977 | 517 | 51.3 | 44712035 |
| gRNA055 | GCAGGGUUUCUCCAUUCUCU | 795 | −499 | 51.4 | 44711041 |
| gRNA153 | CCAGCCCUGGACUAGCCCCA | 893 | 214 | 51.5 | 44711754 |
| gRNA187 | CAGGGGAGACCUUUGGCCUA | 927 | 323 | 51.5 | 44711841 |
| gRNA188 | AGACCUUUGGCCUACGGCGA | 928 | 329 | 51.5 | 44711847 |
| gRNA233 | GAACGCGUGGAGGGGCGCUU | 973 | 509 | 51.5 | 44712027 |
| gRNA148 | AGCCCCACGGCGGGCCACCA | 888 | 201 | 51.6 | 44711741 |
| gRNA213 | CUCCCCCAGCGCAGCUGGAG | 953 | 443 | 51.6 | 44711961 |
| gRNA001 | GGCGCGCACCCCAGAUCGGA | 741 | −235 | 52.1 | 44711283 |
| gRNA203 | CAGAGCGCCGAGGUUGGGGG | 943 | 388 | 52.2 | 44711906 |
| gRNA255 | CACAUAGACCCAGAGGUGCU | 995 | 635 | 52.4 | 44712175 |
| gRNA150 | CCCGCCGUGGGGCUAGUCCA | 890 | 210 | 52.5 | 44711728 |
| gRNA194 | CCCGACCCUCCCGUCGCCGU | 934 | 339 | 52.5 | 44711879 |
| gRNA112 | GAGACAGGUGACGGUCCCUG | 852 | −84 | 52.6 | 44711434 |
| gRNA108 | CAAGCCAGCGACGCAGUGCC | 848 | −107 | 52.9 | 44711433 |
| gRNA234 | AACGCGUGGAGGGGCGCUUG | 974 | 510 | 53.4 | 44712028 |
| gRNA123 | CUCGCGCUACUCUCUCUUUC | 863 | 56 | 53.5 | 44711574 |
| gRNA204 | AGAGCGCCGAGGUUGGGGGA | 944 | 389 | 53.6 | 44711907 |
| gRNA017 | GGGUGCAGAGCGGGAGAGGA | 757 | 125 | 53.9 | 44711665 |
| gRNA110 | UGCGUCGCUGGCUUGGAGAC | 850 | −99 | 54.5 | 44711419 |
| gRNA191 | CUUUGGCCUACGGCGACGGG | 931 | 333 | 54.8 | 44711851 |
| gRNA133 | GGCCACAGAGGGUGCAGAGC | 873 | 134 | 54.9 | 44711674 |
| gRNA173 | UGGGGAAGGGGGUGCGCACC | 913 | 268 | 54.9 | 44711786 |
| gRNA089 | GCGCCCGGUGUCCCAAGCUG | 829 | −256 | 55.2 | 44711262 |
| gRNA182 | CCCCUGCUCCCCGCCGAAAG | 922 | 306 | 55.3 | 44711846 |
| gRNA092 | UGGGGUGCGCGCCCCAGCUU | 832 | −245 | 55.4 | 44711295 |
| gRNA253 | UUCGCAUGUCCUAGCACCUC | 993 | 626 | 55.6 | 44712144 |
| gRNA118 | AAACGCGUGCCCAGCCAAUC | 858 | −54 | 55.7 | 44711486 |
| gRNA215 | CCCCACUCCAGCUGCGCUGG | 955 | 445 | 56.1 | 44711985 |
| gRNA217 | CCCCAGCGCAGCUGGAGUGG | 957 | 446 | 56.1 | 44711964 |
| gRNA114 | CAAUCAGGACAAGGCCCGCA | 854 | −69 | 56.2 | 44711471 |
| gRNA058 | GAGAAUGGAGAAACCCUGCA | 798 | −495 | 56.4 | 44711023 |
| gRNA178 | GCGCUACUUGCCCCUUUCGG | 918 | 296 | 56.7 | 44711814 |
| gRNA111 | GCUGGCUUGGAGACAGGUGA | 851 | −93 | 57.4 | 44711425 |
| gRNA054 | AUAGUCCCAAAAGCAUCCUG | 794 | −530 | 57.5 | 44711010 |
| gRNA190 | CUCCCGUCGCCGUAGGCCAA | 930 | 332 | 57.6 | 44711872 |
| gRNA098 | UACAUCGGCGCCCUCCGAUC | 838 | −225 | 57.8 | 44711315 |
| gRNA059 | CAGCUUGGGAAUUCCCUGCA | 799 | −482 | 58.2 | 44711058 |
| gRNA052 | ACCUUCUCUGAGCUGUCCUC | 792 | −546 | 58.3 | 44710972 |
| gRNA166 | GCGGCGGGGUGGCCUGGGAG | 906 | 248 | 58.4 | 44711766 |
| gRNA004 | GUGCCCAGCCAAUCAGGACA | 744 | −60 | 58.6 | 44711480 |
| gRNA070 | UCCGAGCAGUUAACUGGCUG | 810 | −370 | 58.6 | 44711148 |
| gRNA101 | UAAGAAGGCAUGCACUAGAC | 841 | −186 | 58.9 | 44711354 |
| gRNA134 | GGGCCACAGAGGGUGCAGAG | 874 | 135 | 59 | 44711675 |
| gRNA096 | CAUCGGCGCCCUCCGAUCUG | 836 | −227 | 59.1 | 44711313 |
| gRNA121 | AGUGGAGGCGUCGCGCUGGC | 861 | −25 | 59.3 | 44711493 |
| gRNA235 | GUGGAGGGGCGCUUGGGGUC | 975 | 515 | 59.5 | 44712033 |
| gRNA113 | AGACAGGUGACGGUCCCUGC | 853 | −83 | 59.8 | 44711435 |
| gRNA218 | CCCCCACUCCAGCUGCGCUG | 958 | 446 | 60.2 | 44711986 |
| gRNA056 | UGCAGGGUUUCUCCAUUCUC | 796 | −498 | 60.6 | 44711042 |
| gRNA211 | AGCUGCGCUGGGGGAGCCAG | 951 | 436 | 60.6 | 44711976 |
| gRNA097 | ACAUCGGCGCCCUCCGAUCU | 837 | −226 | 61 | 44711314 |
| gRNA082 | AUUCUAGGACUUCAGGCUGG | 822 | −281 | 61.4 | 44711259 |
| gRNA019 | GCUACUUGCCCCUUUCGGCG | 759 | 298 | 61.7 | 44711816 |
| gRNA067 | UGCAGGUCCGAGCAGUUAAC | 807 | −376 | 62.1 | 44711142 |
| gRNA209 | CCAGAGGCCCCGCGAAAGAG | 949 | 420 | 62.2 | 44711960 |
| gRNA107 | CUAACCUGGCACUGCGUCGC | 847 | −111 | 62.4 | 44711407 |
| gRNA239 | GGGCGCUUGGGGUCUGGGGG | 979 | 521 | 62.8 | 44712039 |
| gRNA060 | ACAGCUUGGGAAUUCCCUGC | 800 | −481 | 63 | 44711059 |
| gRNA220 | GUCCCCCACUCCAGCUGCGC | 960 | 448 | 63 | 44711988 |
| gRNA109 | CUGGCACUGCGUCGCUGGCU | 849 | −106 | 63.1 | 44711412 |
| gRNA167 | CGGCGGGGUGGCCUGGGAGU | 907 | 249 | 63.4 | 44711767 |
| gRNA149 | GCCCGCCGUGGGGCUAGUCC | 889 | 209 | 63.5 | 44711727 |
| gRNA152 | GCCCUGGACUAGCCCCACGG | 892 | 211 | 64.2 | 44711751 |
| gRNA168 | GGCGGGGUGGCCUGGGAGUG | 908 | 250 | 64.9 | 44711768 |
| gRNA073 | AGCAAGUCACUUAGCAUCUC | 813 | −340 | 65 | 44711178 |
| gRNA095 | GGGCGCGCACCCCAGAUCGG | 835 | −236 | 65 | 44711282 |
| gRNA115 | CCAAUCAGGACAAGGCCCGC | 855 | −68 | 65.4 | 44711472 |
| gRNA240 | GGUCUGGGGGAGGCGUCGCC | 980 | 531 | 65.5 | 44712049 |
| gRNA087 | GAGCGCCCGGUGUCCCAAGC | 827 | −258 | 65.6 | 44711260 |
| gRNA219 | UCCCCCACUCCAGCUGCGCU | 959 | 447 | 65.6 | 44711987 |
| gRNA183 | CCCCUUUCGGCGGGGAGCAG | 923 | 306 | 65.7 | 44711824 |
| gRNA228 | CGCUGAGGUUUGUGAACGCG | 968 | 496 | 65.7 | 44712014 |
| gRNA074 | GCAAGUCACUUAGCAUCUCU | 814 | −339 | 66 | 44711179 |
| gRNA050 | AGGGAUACAAGAAGCAAGAA | 790 | −584 | 66.1 | 44710934 |
| gRNA229 | UGAGGUUUGUGAACGCGUGG | 969 | 499 | 66.1 | 44712017 |
| gRNA061 | UCUGUUUAUAACUACAGCUU | 801 | −468 | 66.9 | 44711072 |
| gRNA212 | UCUGGCUCCCCCAGCGCAGC | 952 | 438 | 66.9 | 44711956 |
| gRNA124 | GCUACUCUCUCUUUCUGGCC | 864 | 61 | 67.1 | 44711579 |
| gRNA226 | AACCUCAGCGCCGCGCCUUU | 966 | 483 | 67.1 | 44712023 |
| gRNA068 | GGUCCGAGCAGUUAACUGGC | 808 | −372 | 67.7 | 44711146 |
| gRNA071 | GCCCCAGCCAGUUAACUGCU | 811 | −369 | 67.8 | 44711171 |
| gRNA085 | GAAGUCCUAGAAUGAGCGCC | 825 | −271 | 68.2 | 44711247 |
| gRNA116 | CCUGCGGGCCUUGUCCUGAU | 856 | −68 | 68.8 | 44711450 |
| gRNA046 | UAAACAGCAAGGACAUAGGG | 786 | −646 | 68.9 | 44710872 |
| gRNA047 | GGACAUAGGGAGGAACUUCU | 787 | −636 | 69 | 44710882 |
| gRNA232 | UGAACGCGUGGAGGGGCGCU | 972 | 508 | 69.4 | 44712026 |
| gRNA048 | UCCCUUCAGGAAAAAGUGUU | 788 | −602 | 69.5 | 44710938 |
| gRNA169 | GGGUGGCCUGGGAGUGGGGA | 909 | 254 | 70.8 | 44711772 |
| gRNA057 | AGAGAAUGGAGAAACCCUGC | 797 | −496 | 70.9 | 44711022 |
| gRNA179 | CGCUACUUGCCCCUUUCGGC | 919 | 297 | 71 | 44711815 |
| gRNA044 | ACCUAAACAGCAAGGACAUA | 784 | −649 | 71.2 | 44710869 |
| gRNA103 | UAAGAAAAGGAAACUGAAAA | 843 | −148 | 71.2 | 44711370 |
| gRNA043 | UACCUAAACAGCAAGGACAU | 783 | −650 | 71.6 | 44710868 |
| gRNA045 | UCCCUAUGUCCUUGCUGUUU | 785 | −648 | 71.8 | 44710892 |
| gRNA185 | CUCCCCUGCUCCCCGCCGAA | 925 | 308 | 71.8 | 44711848 |
| gRNA021 | AGUAAAAGCAGUAACUGCUA | 1735 | −732 | 73.8 | 44710742 |
| gRNA033 | GUUGAUUUGUCGGGGGGCGG | 773 | −687 | 73.9 | 44710853 |
| gRNA151 | CCCUGGACUAGCCCCACGGC | 891 | 210 | 74.5 | 44711750 |
| gRNA181 | GCCCCUUUCGGCGGGGAGCA | 921 | 305 | 74.5 | 44711823 |
| gRNA036 | UCUGUUGAUUUGUCGGGGGG | 776 | −684 | 74.6 | 44710856 |
| gRNA069 | GUCCGAGCAGUUAACUGGCU | 809 | −371 | 75.1 | 44711147 |
| gRNA049 | CUUGCUUCUUGUAUCCCUUC | 789 | −589 | 75.3 | 44710951 |
| gRNA117 | CGGGCCUUGUCCUGAUUGGC | 857 | −64 | 75.4 | 44711454 |
| gRNA051 | AAGAAAGGUACUCUUUCACU | 791 | −569 | 75.5 | 44710949 |
| gRNA094 | CUGGGGCGCGCACCCCAGAU | 834 | −239 | 76.6 | 44711279 |
| gRNA037 | UGUUCUGUUGAUUUGUCGGG | 777 | −681 | 76.7 | 44710859 |
| gRNA031 | UGAUUUGUCGGGGGGCGGGG | 771 | −689 | 77.2 | 44710851 |
| gRNA198 | CGAUAAGCGUCAGAGCGCCG | 938 | 378 | 77.2 | 44711896 |
| gRNA042 | AGAAAAUUACCUAAACAGCA | 782 | −657 | 77.3 | 44710861 |
| gRNA206 | GUUUCUCUUCCGCUCUUUCG | 946 | 411 | 77.3 | 44711929 |
| gRNA093 | CUGGGGUGCGCGCCCCAGCU | 833 | −244 | 77.6 | 44711296 |
| gRNA165 | GGGAAGCGGCGGGGUGGCCU | 905 | 243 | 78.1 | 44711761 |
| gRNA062 | UUCUGUUUAUAACUACAGCU | 802 | −467 | 78.2 | 44711073 |
| gRNA064 | UUUGAAUGCUACCUAGCAGA | 804 | −439 | 78.8 | 44711101 |
| gRNA065 | AUUCAAAGAUCUUAAUCUUC | 805 | −423 | 79 | 44711095 |
| gRNA030 | UAGUAAAAGCAGUAACUGCU | 770 | −731 | 79.1 | 44710809 |
| gRNA034 | UGUUGAUUUGUCGGGGGGCG | 774 | −686 | 79.1 | 44710854 |
| gRNA180 | UGCCCCUUUCGGCGGGGAGC | 920 | 304 | 79.2 | 44711822 |
| gRNA066 | UUCAAAGAUCUUAAUCUUCU | 806 | −422 | 79.3 | 44711096 |
| gRNA210 | CCGCUCUUUCGCGGGGCCUC | 950 | 420 | 79.6 | 44711938 |
| gRNA035 | CUGUUGAUUUGUCGGGGGGC | 775 | −685 | 79.7 | 44710855 |
| gRNA236 | UGGAGGGGCGCUUGGGGUCU | 976 | 516 | 79.7 | 44712034 |
| gRNA040 | CUUUGUUCUGUUGAUUUGUC | 780 | −678 | 79.9 | 44710862 |
| gRNA164 | GGGGAAGCGGCGGGGUGGCC | 904 | 242 | 80.1 | 44711760 |
| gRNA063 | ACAGAAGUUCUCCUUCUGCU | 803 | −450 | 80.8 | 44711068 |
| gRNA207 | UUUCUCUUCCGCUCUUUCGC | 947 | 412 | 81.8 | 44711930 |
| gRNA208 | UUCUCUUCCGCUCUUUCGCG | 948 | 413 | 82.1 | 44711931 |
| gRNA038 | UUGUUCUGUUGAUUUGUCGG | 778 | −680 | 82.7 | 44710860 |
| gRNA032 | UUGAUUUGUCGGGGGGCGGG | 772 | −688 | 82.8 | 44710852 |
| gRNA227 | AAACCUCAGCGCCGCGCCUU | 967 | 484 | 84.4 | 44712024 |
| gRNA039 | UUUGUUCUGUUGAUUUGUCG | 779 | −679 | 86.3 | 44710861 |

[0280] 172 of the best-performing gRNAs (i.e., with the best β2M protein knockdown efficiency) from the above primary screen were ordered as single guide RNAs (sgRNAs) for further follow-up studies in mRNA/sgRNA format.

### Example 5: gRNA Screen Confirmation in Primary T Cells

[0281] This Example describes a study in which the gRNAs are subject to screening in human primary T cells.

[0282] T cells are isolated from human leukapheresis product (StemCell Technologies, Cat. No. 70500) using the EasySep™ Human T cell Isolation Kit (StemCell Technologies, Cat. No. 17951). T cells are thawed and activated. Prior to nucleofection, T cells are thawed, washed, and stimulated using Dynabeads Human T-Activator CD3/CD28 for T Cell Expansion and Activation (Thermo Fisher, Cat. No. 11131D) at a 3:1 bead-to-cell number ratio for approximately 48 hours at 37° C. with 5% CO₂ in complete T cell medium (X-VIVO15 media; Lonza, Cat. No. BEBP04-744Q) supplemented with 5% Human AB serum (Gemini Bio-Product, Cat. No. 100-512), 2 mM L-alanyl-L-glutamine, 5 ng/ml IL-7 and 5 ng/ml IL-15. Beads are then magnetically removed from the culture and T cells are cultured in fresh complete T cell medium for approximately 24 hours. T cells are then nucleofected with 2.5 μg CRISPR-off mRNA (TriLink) plus 2.5 μg sgRNA (IDT) at 2E5 cells/well using the P3 Primary Cell 96-well Nucleofector Kit (Lonza, Cat. No. V4SP-3960) and the Amaxa 4D nucleofector (Lonza) with pulse code EO115.

[0283] After nucleofection, T cells are resuspended in complete T cell medium and maintained by replacement of media and passages as necessary twice weekly. Cells are restimulated with ImmunoCult™ Human CD3/CD28 T Cell Activator (StemCell Technologies, Cat. No. 10991) on day 13 post-nucleofection.

[0284] Cell surface β2M protein expression on live T cells is assessed by flow cytometry at days 6, 13, and 20 post-nucleofection. No mRNA, CRISPR-off mRNA plus non-B2M targeting sgRNA, CRISPR-off mRNA with no gRNA, WT Cas9 mRNA plus exon-targeting sgRNA, stain only (no mRNA or gRNA), isotype (no mRNA or gRNA), and no-stain (no mRNA or gRNA) controls are also run on each screening plate.

[0285] β2M flow cytometry assay is performed as described in Example 5. Test samples are compared to negative (CRISPR-off mRNA with no sgRNA) control expression levels to assess % silencing.

### Example 6: ZF Screening in Primary T Cells

[0286] This Example describes a study in which the ZFP domains targeting various genomic regions of the B2M gene are subject to screening in human primary T cells.

[0287] T cells were isolated from human leukapheresis product and stored cryogenically. Prior to nucleofection, T cells were thawed, and stimulated with CD3/CD28 beads for approximately 48 hours in complete T cell medium at 37° C. with 5% CO₂. Beads were then magnetically removed from the culture and T cells are cultured in fresh complete T cell medium. T cells were nucleofected with ZF-off mRNA using the Lonza Amaxa 4D nucleofector. After nucleofection, T cells were resuspended in complete T cell medium and maintained by replacement of media and splitting of cells as necessary twice weekly. Cells were restimulated with soluble CD3/CD28 T Cell Activator on day 13 post-nucleofection. Cell surface B2M protein expression on live T cells was assessed by flow cytometry at days 6, 13, and 20 post-nucleofection. No mRNA, non-B2M targeting ZF-off mRNA, WT Cas9 mRNA plus exon-targeting gRNA, stain only, isotype, and no-stain controls were also run on each screening plate.

[0288] β2M flow cytometry assay is performed as described in Example 5. Screening conditions were compared to negative (non-B2M targeting ZF) control expression levels to assess % silencing. The following ZF constructs are tested:

| ZF | | |
|---|---|---|
| construct | Sequence | SEQ ID NO: |
| 1 | SRPGERPFQCRICMRNFSQSAHLKRHLRTHTGEKPFQCRICMRNFSLKHDLRRHL | 1291 |
| | KTHTGGGGSQKPFQCRICMRNFSKRQYLQVHTRTHTGEKPFQCRICMRNFSDR | |
| | ANLRRHLRTHTGGGGSQKPFQCRICMRNFSRQDNLGRHLRTHTGEKPFQCRIC | |
| | MRNFSRRDHLPGHLKTHLRGS | |
| 2 | SRPGERPFQCRICMRNFSRREHLVRHLRTHTGEKPFQCRICMRNFSHHNSLTRHL | 1292 |
| | KTHTGSQKPFQCRICMRNFSRQDNLGRHLRTHTGEKPFQCRICMRNFSDKSVLA | |
| | RHLKTHTGGGGSQKPFQCRICMRNFSRADNLGRHLRTHTGEKPFQCRICMRNFS | |
| | TNNWLNQHLKTHLRGS | |
| 3 | SRPGERPFQCRICMRNFSRQDNLHTHLRTHTGEKPFQCRICMRNFSQGGTLRRH | 1293 |
| | LKTHTGGGGSQKPFQCRICMRNFSDHSSLKRHLRTHTGEKPFQCRICMRNFSQS | |
| | NTLRSHLKTHTGSQKPFQCRICMRNFSRVDHLHRHLRTHTGEKPFQCRICMRNF | |
| | SRSHTLTSHLKTHLRGS | |
| 4 | SRPGERPFQCRICMRNFSRREHLTIHLRTHTGEKPFQCRICMRNFSRLDMLARHL | 1294 |
| | KTHTGGGGSQKPFQCRICMRNFSQQTNLTRHLRTHTGEKPFQCRICMRNFSVA | |
| | HGLQAHLKTHTGSQKPFQCRICMRNFSHKSSLTRHLRTHTGEKPFQCRICMRNFS | |
| | RPDNLPRHLKTHLRGS | |
| 5 | SRPGERPFQCRICMRNFSRNRNLVLHTRTHTGEKPFQCRICMRNFSQSTTLKRHL | 1295 |
| | RTHTGGGGSQKPFQCRICMRNFSQNANLARHLRTHTGEKPFQCRICMRNFSQK | |
| | ANLGVHLKTHTGSQKPFQCRICMRNFSTNSSLTRHLRTHTGEKPFQCRICMRNFS | |
| | ISHNLARHLKTHLRGS | |
| 6 | SRPGERPFQCRICMRNFSRRAHLLSHTRTHTGEKPFQCRICMRNFSEAHHLSRHL | 1296 |
| | RTHTGSQKPFQCRICMRNFSKNNDLTRHTRTHTGEKPFQCRICMRNFSRREHLV | |
| | RHLRTHTGGGGSQKPFQCRICMRNFSRNFILQRHTRTHTGEKPFQCRICMRNFS | |
| | QSAHLKRHLRTHLRGS | |
| 7 | SRPGERPFQCRICMRNFSKRHTLTRHTRTHTGEKPFQCRICMRNFSRREHLVRHL | 1297 |
| | RTHTGGGGSQKPFQCRICMRNFSRQHHLTYHTRTHTGEKPFQCRICMRNFSRTD | |
| | TLARHLRTHTGSQKPFQCRICMRNFSGPTALRHHTRTHTGEKPFQCRICMRNFSR | |
| | REVLENHLRTHLRGS | |
| 8 | SRPGERPFQCRICMRNFSSPSKLVRHTRTHTGEKPFQCRICMRNFSRQDHLTNHL | 1298 |
| | RTHTGSQKPFQCRICMRNFSRQHHLTYHTRTHTGEKPFQCRICMRNFSRTDTLA | |
| | RHLRTHTGGGGSQKPFQCRICMRNFSQQTNLTRHLRTHTGEKPFQCRICMRNFS | |
| | QPHGLAHHLKTHLRGS | |
| 9 | SRPGERPFQCRICMRNFSLSQTLKRHTRTHTGEKPFQCRICMRNFSRTDTLARHL | 1299 |
| | RTHTGGGGSQKPFQCRICMRNFSRRRNLTLHTRTHTGEKPFQCRICMRNFSDRS | |
| | SLKRHLRTHTGGGGSQKPFQCRICMRNFSDSSVLRRHLRTHTGEKPFQCRICMR | |
| | NFSQGQNLTIHLKTHLRGS | |
| 10 | SRPGERPFQCRICMRNFSTHAHLTRHTRTHTGEKPFQCRICMRNFSEKHDLKRHL | 1300 |
| | RTHTGGGGSQKPFQCRICMRNFSKRQYLQVHTRTHTGEKPFQCRICMRNFSDR | |
| | ANLRRHLRTHTGGGGSQKPFQCRICMRNFSRQDNLGRHLRTHTGEKPFQCRIC | |
| | MRNFSRPESLRPHLKTHLRGS | |
| 11 | SRPGERPFQCRICMRNFSRREHLVRHLRTHTGEKPFQCRICMRNFSINHSLRRHL | 1301 |
| | KTHTGSQKPFQCRICMRNFSRQDNLGRHLRTHTGEKPFQCRICMRNFSDKSVLA | |
| | RHLKTHTGGGGSQKPFQCRICMRNFSRADNLGRHLRTHTGEKPFQCRICMRNFS | |
| | TNNWLNQHLKTHLRGS | |
| 12 | SRPGERPFQCRICMRNFSRREHLVRHLRTHTGEKPFQCRICMRNFSINHSLRRHL | 1301 |
| | KTHTGSQKPFQCRICMRNFSRQDNLGRHLRTHTGEKPFQCRICMRNFSDKSVLA | |
| | RHLKTHTGGGGSQKPFQCRICMRNFSRADNLGRHLRTHTGEKPFQCRICMRNFS | |
| | TNNWLNQHLKTHLRGS | |
| 13 | SRPGERPFQCRICMRNFSRQHHLTYHTRTHTGEKPFQCRICMRNFSRTDTLARHL | 1303 |
| | RTHTGGGGSQKPFQCRICMRNFSQQTNLTRHLRTHTGEKPFQCRICMRNFSQP | |
| | HGLAHHLKTHTGSQKPFQCRICMRNFSMTSSLRRHTRTHTGEKPFQCRICMRNF | |
| | SRQDNLGRHLRTHLRGS | |
| 14 | SRPGERPFQCRICMRNFSRNRNLVLHTRTHTGEKPFQCRICMRNFSQSTTLKRHL | 1304 |
| | RTHTGGGGSQKPFQCRICMRNFSQQTNLTRHLRTHTGEKPFQCRICMRNFSQG | |
| | GNLALHLKTHTGSQKPFQCRICMRNFSTNSSLTRHLRTHTGEKPFQCRICMRNFS | |
| | VVSNLRRHLKTHLRGS | |
| 15 | SRPGERPFQCRICMRNFSRRAHLLSHTRTHTGEKPFQCRICMRNFSEAHHLSRHL | 1305 |
| | RTHTGSQKPFQCRICMRNFSRRHDLRRHTRTHTGEKPFQCRICMRNFSRQAHLQ | |
| | NHLRTHTGGGGSQKPFQCRICMRNFSTTYHLIRHTRTHTGEKPFQCRICMRNFS | |
| | QSAHLKRHLRTHLRGS | |
| 16 | SRPGERPFQCRICMRNFSKHHTLQRHTRTHTGEKPFQCRICMRNFSRREHLVRHL | 1306 |
| | RTHTGGGGSQKPFQCRICMRNFSRQHHLTYHTRTHTGEKPFQCRICMRNFSRTD | |
| | TLARHLRTHTGSQKPFQCRICMRNFSGHTALRHHTRTHTGEKPFQCRICMRNFS | |
| | RREVLENHLRTHLRGS | |
| 17 | SRPGERPFQCRICMRNFSSPSKLVRHTRTHTGEKPFQCRICMRNFSRQDHLTNHL | 1307 |
| | RTHTGSQKPFQCRICMRNFSRQHHLTYHTRTHTGEKPFQCRICMRNFSRTDTLA | |
| | RHLRTHTGGGGSQKPFQCRICMRNFSLRANLQRHTRTHTGEKPFQCRICMRNFS | |
| | QPHSLAVHLRTHLRGS | |
| 18 | SRPGERPFQCRICMRNFSLSQTLKRHTRTHTGEKPFQCRICMRNFSRTDTLARHL | 1308 |
| | RTHTGGGGSQKPFQCRICMRNFSRRRNLTLHTRTHTGEKPFQCRICMRNFSDRS | |
| | SLKRHLRTHTGGGGSQKPFQCRICMRNFSDSSVLRRHLRTHTGEKPFQCRICMR | |
| | NFSQSGNLHTHLKTHLRGS | |
| 19 | SRPGERPFQCRICMRNFSTHAHLTRHTRTHTGEKPFQCRICMRNFSEKHDLKRHL | 1309 |
| | RTHTGGGGSQKPFQCRICMRNFSKKQYLVCHTRTHTGEKPFQCRICMRNFSDSS | |
| | NLTRHLRTHTGGGGSQKPFQCRICMRNFSRQDNLGRHLRTHTGEKPFQCRICM | |
| | RNFSRRDHLPGHLKTHLRGS | |
| 20 | SRPGERPFQCRICMRNFSRREHLVRHLRTHTGEKPFQCRICMRNFSINHSLRRHL | 1310 |
| | KTHTGSQKPFQCRICMRNFSKKTNLTRHTRTHTGEKPFQCRICMRNFSESTTLKR | |
| | HLRTHTGGGGSQKPFQCRICMRNFSRQDNLGRHLRTHTGEKPFQCRICMRNFST | |
| | NHWLLIHLKTHLRGS | |
| 21 | SRPGERPFQCRICMRNFSRREHLTIHLRTHTGEKPFQCRICMRNFSRLDMLARHL | 1311 |
| | KTHTGSQKPFQCRICMRNFSGPTALRHHTRTHTGEKPFQCRICMRNFSRREVLE | |
| | NHLRTHTGGGGSQKPFQCRICMRNFSHKSSLTRHLRTHTGEKPFQCRICMRNFS | |
| | RIDNLIRHLKTHLRGS | |
| 22 | SRPGERPFQCRICMRNFSRQHHLTYHTRTHTGEKPFQCRICMRNFSRTDTLARHL | 1312 |
| | RTHTGGGGSQKPFQCRICMRNFSQQTNLTRHLRTHTGEKPFQCRICMRNFSVA | |
| | HGLQAHLKTHTGSQKPFQCRICMRNFSHKSSLTRHLRTHTGEKPFQCRICMRNFS | |
| | RPDNLPRHLKTHLRGS | |
| 23 | SRPGERPFQCRICMRNFSRGRNLMLHTRTHTGEKPFQCRICMRNFSQSTTLKRH | 1313 |
| | LRTHTGGGGSQKPFQCRICMRNFSQAGNLVRHLRTHTGEKPFQCRICMRNFSQ | |
| | KVNLGIHLKTHTGSQKPFQCRICMRNFSTNSSLTRHLRTHTGEKPFQCRICMRNF | |
| | SVVSNLRRHLKTHLRGS | |
| 24 | SRPGERPFQCRICMRNFSSPSKLVRHTRTHTGEKPFQCRICMRNFSRQDHLTNHL | 1314 |
| | RTHTGSQKPFQCRICMRNFSRQHHLTYHTRTHTGEKPFQCRICMRNFSRTDTLA | |
| | RHLRTHTGSQKPFQCRICMRNFSGPTALRHHTRTHTGEKPFQCRICMRNFSRRE | |
| | VLENHLRTHLRGS | |
| 25 | SRPGERPFQCRICMRNFSKRHTLTRHTRTHTGEKPFQCRICMRNFSRREHLVRHL | 1315 |
| | RTHTGGGGSQKPFQCRICMRNFSRREHLTIHLRTHTGEKPFQCRICMRNFSRLD | |
| | MLARHLKTHTGSQKPFQCRICMRNFSGPTALRHHTRTHTGEKPFQCRICMRNFS | |
| | RREVLENHLRTHLRGS | |
| 26 | SRPGERPFQCRICMRNFSSPSKLVRHTRTHTGEKPFQCRICMRNFSRQDHLTNHL | 1316 |
| | RTHTGSQKPFQCRICMRNFSRREHLTIHLRTHTGEKPFQCRICMRNFSRTDLLGR | |
| | HLKTHTGGGGSQKPFQCRICMRNFSQQTNLTRHLRTHTGEKPFQCRICMRNFS | |
| | QPHGLAHHLKTHLRGS | |
| 27 | SRPGERPFQCRICMRNFSLSQTLKRHTRTHTGEKPFQCRICMRNFSRTDTLARHL | 1317 |
| | RTHTGGGGSQKPFQCRICMRNFSRRRNLQLHTRTHTGEKPFQCRICMRNFSDHS | |
| | SLKRHLRTHTGGGGSQKPFQCRICMRNFSDSSVLRRHLRTHTGEKPFQCRICMR | |
| | NFSQGQNLTIHLKTHLRGS | |
| 28 | SRPGERPFQCRICMRNFSTHAHLTRHTRTHTGEKPFQCRICMRNFSEKHDLKRHL | 1318 |
| | RTHTGGGGSQKPFQCRICMRNFSKKQYLVCHTRTHTGEKPFQCRICMRNFSDQT | |
| | NLRRHLRTHTGGGGSQKPFQCRICMRNFSRQDNLGRHLRTHTGEKPFQCRICM | |
| | RNFSRPESLRPHLKTHLRGS | |
| 29 | SRPGERPFQCRICMRNFSRREHLVRHLRTHTGEKPFQCRICMRNFSINHSLRRHL | 1319 |
| | KTHTGSQKPFQCRICMRNFSKKTNLTRHTRTHTGEKPFQCRICMRNFSESTTLKR | |
| | HLRTHTGGGGSQKPFQCRICMRNFSRADNLGRHLRTHTGEKPFQCRICMRNFST | |
| | KQWTLGHLKTHLRGS | |
| 30 | SRPGERPFQCRICMRNFSKKCHLVTHTRTHTGEKPFQCRICMRNFSRRDILGRHL | 1320 |
| | RTHTGSQKPFQCRICMRNFSGHTALRHHTRTHTGEKPFQCRICMRNFSRREVLE | |
| | NHLRTHTGGGGSQKPFQCRICMRNFSHKSSLTRHLRTHTGEKPFQCRICMRNFS | |
| | RIDNLIRHLKTHLRGS | |
| 31 | SRPGERPFQCRICMRNFSRQHHLTYHTRTHTGEKPFQCRICMRNFSRTDTLARHL | 1321 |
| | RTHTGGGGSQKPFQCRICMRNFSQQTNLTRHLRTHTGEKPFQCRICMRNFSQP | |
| | HGLAHHLKTHTGSQKPFQCRICMRNFSHKSSLTRHLRTHTGEKPFQCRICMRNFS | |
| | RPDNLPRHLKTHLRGS | |
| 32 | SRPGERPFQCRICMRNFSRARNLTLHTRTHTGEKPFQCRICMRNFSQSTTLKRHL | 1322 |
| | RTHTGGGGSQKPFQCRICMRNFSQQTNLTRHLRTHTGEKPFQCRICMRNFSQG | |
| | GNLALHLKTHTGSQKPFQCRICMRNFSHESSLRRHLRTHTGEKPFQCRICMRNFSI | |
| | SHNLARHLKTHLRGS | |
| 33 | SRPGERPFQCRICMRNFSVPSKLLRHTRTHTGEKPFQCRICMRNFSRQDHLTNHL | 1323 |
| | RTHTGSQKPFQCRICMRNFSRREHLTIHLRTHTGEKPFQCRICMRNFSRLDMLAR | |
| | HLKTHTGSQKPFQCRICMRNFSGHTALRHHTRTHTGEKPFQCRICMRNFSRREV | |
| | LENHLRTHLRGS | |
| 34 | SRPGERPFQCRICMRNFSRTNDLARHTRTHTGEKPFQCRICMRNFSRREHLVRHL | 1324 |
| | RTHTGGGGSQKPFQCRICMRNFSRQHHLTYHTRTHTGEKPFQCRICMRNFSRTD | |
| | TLARHLRTHTGSQKPFQCRICMRNFSGHTALRHHTRTHTGEKPFQCRICMRNFS | |
| | RREVLENHLRTHLRGS | |
| 35 | SRPGERPFQCRICMRNFSSPSKLVRHTRTHTGEKPFQCRICMRNFSRQDHLTNHL | 1325 |
| | RTHTGSQKPFQCRICMRNFSRQHHLTYHTRTHTGEKPFQCRICMRNFSRTDTLA | |
| | RHLRTHTGGGGSQKPFQCRICMRNFSQQTNLTRHLRTHTGEKPFQCRICMRNFS | |
| | VAHGLQAHLKTHLRGS | |
| 36 | SRPGERPFQCRICMRNFSLSQTLKRHLRTHTGEKPFQCRICMRNFSRLDMLARHL | 1326 |
| | KTHTGGGGSQKPFQCRICMRNFSRRRNLTLHTRTHTGEKPFQCRICMRNFSDRS | |
| | SLKRHLRTHTGGGGSQKPFQCRICMRNFSDSSVLRRHLRTHTGEKPFQCRICMR | |
| | NFSQGQNLTIHLKTHLRGS | |
| 37 | SRPGERPFQCRICMRNFSQSAHLKRHLRTHTGEKPFQCRICMRNFSLKHDLRRHL | 1327 |
| | KTHTGGGGSQKPFQCRICMRNFSKKQYLVCHTRTHTGEKPFQCRICMRNFSDQT | |
| | NLRRHLRTHTGGGGSQKPFQCRICMRNFSRQDNLGRHLRTHTGEKPFQCRICM | |
| | RNFSRRDHLPGHLKTHLRGS | |
| 38 | SRPGERPFQCRICMRNFSRREHLVRHLRTHTGEKPFQCRICMRNFSVNSSLGRHL | 1328 |
| | KTHTGSQKPFQCRICMRNFSRQDNLGRHLRTHTGEKPFQCRICMRNFSDKSVLA | |
| | RHLKTHTGGGGSQKPFQCRICMRNFSRADNLGRHLRTHTGEKPFQCRICMRNFS | |
| | TNNWLNQHLKTHLRGS | |
| 39 | SRPGERPFQCRICMRNFSKKCHLVTHTRTHTGEKPFQCRICMRNFSRRDILGRHL | 1329 |
| | RTHTGSQKPFQCRICMRNFSGPTALRHHTRTHTGEKPFQCRICMRNFSRREVLE | |
| | NHLRTHTGGGGSQKPFQCRICMRNFSHKSSLTRHLRTHTGEKPFQCRICMRNFS | |
| | RPDNLPRHLKTHLRGS | |
| 40 | SRPGERPFQCRICMRNFSKKCHLVTHTRTHTGEKPFQCRICMRNFSRRDILGRHL | 1330 |
| | RTHTGGGGSQKPFQCRICMRNFSQQTNLTRHLRTHTGEKPFQCRICMRNFSQP | |
| | HGLAHHLKTHTGSQKPFQCRICMRNFSHKSSLTRHLRTHTGEKPFQCRICMRNFS | |
| | RPDNLPRHLKTHLRGS | |
| 41 | SRPGERPFQCRICMRNFSDPSTLRRHTRTHTGEKPFQCRICMRNFSQSTTLKRHL | 1331 |
| | RTHTGSQKPFQCRICMRNFSKKDHLHRHTRTHTGEKPFQCRICMRNFSRQDNLG | |
| | RHLRTHTGGGGSQKPFQCRICMRNFSRQDNLHTHLRTHTGEKPFQCRICMRNFS | |
| | QGGTLRRHLKTHLRGS | |
| 42 | SRPGERPFQCRICMRNFSVPSKLLRHTRTHTGEKPFQCRICMRNFSRQDHLTNHL | 1332 |
| | RTHTGSQKPFQCRICMRNFSRREHLTIHLRTHTGEKPFQCRICMRNFSRLDMLAR | |
| | HLKTHTGSQKPFQCRICMRNFSGPTALRHHTRTHTGEKPFQCRICMRNFSRREVL | |
| | ENHLRTHLRGS | |
| 43 | SRPGERPFQCRICMRNFSKHHTLQRHTRTHTGEKPFQCRICMRNFSRREHLVRHL | 1333 |
| | RTHTGGGGSQKPFQCRICMRNFSRREHLTIHLRTHTGEKPFQCRICMRNFSRTDL | |
| | LGRHLKTHTGSQKPFQCRICMRNFSGPTALRHHTRTHTGEKPFQCRICMRNFSR | |
| | REVLENHLRTHLRGS | |
| 44 | SRPGERPFQCRICMRNFSSPSKLVRHTRTHTGEKPFQCRICMRNFSRKDHLTTHL | 1334 |
| | RTHTGSQKPFQCRICMRNFSRREHLTIHLRTHTGEKPFQCRICMRNFSRTDLLGR | |
| | HLKTHTGGGGSQKPFQCRICMRNFSQQTNLTRHLRTHTGEKPFQCRICMRNFSV | |
| | AHGLQAHLKTHLRGS | |
| 45 | SRPGERPFQCRICMRNFSLSQTLKRHLRTHTGEKPFQCRICMRNFSRLDMLARHL | 1335 |
| | KTHTGGGGSQKPFQCRICMRNFSRRRNLTLHTRTHTGEKPFQCRICMRNFSDRS | |
| | SLKRHLRTHTGGGGSQKPFQCRICMRNFSDSSVLRRHLRTHTGEKPFQCRICMR | |
| | NFSQSGNLHTHLKTHLRGS | |
| 46 | SRPGERPFQCRICMRNFSQSAHLKRHLRTHTGEKPFQCRICMRNFSLKHDLRRHL | 1336 |
| | KTHTGGGGSQKPFQCRICMRNFSKKQYLVCHTRTHTGEKPFQCRICMRNFSDSS | |
| | NLTRHLRTHTGGGGSQKPFQCRICMRNFSRQDNLGRHLRTHTGEKPFQCRICM | |
| | RNFSRPESLRPHLKTHLRGS | |
| 47 | SRPGERPFQCRICMRNFSRREHLVRHLRTHTGEKPFQCRICMRNFSINHSLRRHL | 1337 |
| | KTHTGSQKPFQCRICMRNFSKKTNLTRHTRTHTGEKPFQCRICMRNFSDRSVLRR | |
| | HLRTHTGGGGSQKPFQCRICMRNFSRADNLGRHLRTHTGEKPFQCRICMRNFST | |
| | KQWTLGHLKTHLRGS | |
| 48 | SRPGERPFQCRICMRNFSRQHHLTYHTRTHTGEKPFQCRICMRNFSRTDTLARHL | 1338 |
| | RTHTGSQKPFQCRICMRNFSGPTALRHHTRTHTGEKPFQCRICMRNFSRREVLE | |
| | NHLRTHTGGGGSQKPFQCRICMRNFSHKSSLTRHLRTHTGEKPFQCRICMRNFS | |
| | RPDNLPRHLKTHLRGS | |
| 49 | SRPGERPFQCRICMRNFSRGRNLMLHTRTHTGEKPFQCRICMRNFSQSTTLKRH | 1339 |
| | LRTHTGGGGSQKPFQCRICMRNFSQAGNLVRHLRTHTGEKPFQCRICMRNFSQ | |
| | KVNLGIHLKTHTGSQKPFQCRICMRNFSHESSLRRHLRTHTGEKPFQCRICMRNF | |
| | SISHNLARHLKTHLRGS | |
| 50 | SRPGERPFQCRICMRNFSDPSTLRRHTRTHTGEKPFQCRICMRNFSQSTTLKRHL | 1340 |
| | RTHTGSQKPFQCRICMRNFSRNTHLARHTRTHTGEKPFQCRICMRNFSRQDNLG | |
| | RHLRTHTGGGGSQKPFQCRICMRNFSRQDNLHTHLRTHTGEKPFQCRICMRNFS | |
| | QGGTLRRHLKTHLRGS | |
| 51 | SRPGERPFQCRICMRNFSVPSKLLRHTRTHTGEKPFQCRICMRNFSRQDHLTNHL | 1341 |
| | RTHTGSQKPFQCRICMRNFSRQHHLTYHTRTHTGEKPFQCRICMRNFSRTDTLA | |
| | RHLRTHTGSQKPFQCRICMRNFSGHTALRHHTRTHTGEKPFQCRICMRNFSRRE | |
| | VLENHLRTHLRGS | |
| 52 | SRPGERPFQCRICMRNFSKHHTLQRHTRTHTGEKPFQCRICMRNFSRREHLVRHL | 1342 |
| | RTHTGGGGSQKPFQCRICMRNFSRREHLTIHLRTHTGEKPFQCRICMRNFSRTDL | |
| | LGRHLKTHTGSQKPFQCRICMRNFSGHTALRHHTRTHTGEKPFQCRICMRNFSR | |
| | REVLENHLRTHLRGS | |
| 53 | SRPGERPFQCRICMRNFSSPSKLVRHTRTHTGEKPFQCRICMRNFSRQDHLTNHL | 1343 |
| | RTHTGSQKPFQCRICMRNFSRREHLTIHLRTHTGEKPFQCRICMRNFSRTDLLGR | |
| | HLKTHTGGGGSQKPFQCRICMRNFSLRANLQRHTRTHTGEKPFQCRICMRNFSQ | |
| | PHSLAVHLRTHLRGS | |
| 54 | SRPGERPFQCRICMRNFSQSAHLKRHLRTHTGEKPFQCRICMRNFSLKHDLRRHL | 1344 |
| | KTHTGGGGSQKPFQCRICMRNFSKRQYLQVHTRTHTGEKPFQCRICMRNFSDR | |
| | ANLRRHLRTHTGGGGSQKPFQCRICMRNFSRQDNLGRHLRTHTGEKPFQCRIC | |
| | MRNFSRPESLRPHLKTHLRGS | |
| 55 | SRPGERPFQCRICMRNFSRREHLVRHLRTHTGEKPFQCRICMRNFSHHNSLTRHL | 1345 |
| | KTHTGSQKPFQCRICMRNFSKKTNLTRHTRTHTGEKPFQCRICMRNFSESTTLKR | |
| | HLRTHTGGGGSQKPFQCRICMRNFSRADNLGRHLRTHTGEKPFQCRICMRNFST | |
| | KQWTLGHLKTHLRGS | |
| 56 | SRPGERPFQCRICMRNFSRQDNLHTHLRTHTGEKPFQCRICMRNFSQGGTLRRH | 1346 |
| | LKTHTGGGGSQKPFQCRICMRNFSDHSSLKRHLRTHTGEKPFQCRICMRNFSQS | |
| | NSLNAHLKTHTGSQKPFQCRICMRNFSRVDHLHRHLRTHTGEKPFQCRICMRNF | |
| | SRSHTLTSHLKTHLRGS | |
| 57 | SRPGERPFQCRICMRNFSRQHHLTYHTRTHTGEKPFQCRICMRNFSRTDTLARHL | 1347 |
| | RTHTGSQKPFQCRICMRNFSGHTALRHHTRTHTGEKPFQCRICMRNFSRREVLE | |
| | NHLRTHTGGGGSQKPFQCRICMRNFSHKSSLTRHLRTHTGEKPFQCRICMRNFS | |
| | RIDNLIRHLKTHLRGS | |
| 58 | SRPGERPFQCRICMRNFSRARNLTLHTRTHTGEKPFQCRICMRNFSQSTTLKRHL | 1348 |
| | RTHTGGGGSQKPFQCRICMRNFSQAGNLVRHLRTHTGEKPFQCRICMRNFSQK | |
| | VNLGIHLKTHTGSQKPFQCRICMRNFSTNSSLTRHLRTHTGEKPFQCRICMRNFS | |
| | VVSNLRRHLKTHLRGS | |
| 59 | SRPGERPFQCRICMRNFSDPSTLRRHTRTHTGEKPFQCRICMRNFSQSTTLKRHL | 1349 |
| | RTHTGSQKPFQCRICMRNFSRREHLVRHLRTHTGEKPFQCRICMRNFSRRDNLN | |
| | RHLKTHTGGGGSQKPFQCRICMRNFSRQDNLHTHLRTHTGEKPFQCRICMRNFS | |
| | QGGTLRRHLKTHLRGS | |
| 60 | SRPGERPFQCRICMRNFSSPSKLVRHTRTHTGEKPFQCRICMRNFSRKDHLTTHL | 1350 |
| | RTHTGSQKPFQCRICMRNFSRREHLTIHLRTHTGEKPFQCRICMRNFSRLDMLAR | |
| | HLKTHTGSQKPFQCRICMRNFSGPTALRHHTRTHTGEKPFQCRICMRNFSRREVL | |
| | ENHLRTHLRGS | |
| 61 | SRPGERPFQCRICMRNFSSPSKLVRHTRTHTGEKPFQCRICMRNFSRQDHLTNHL | 1351 |
| | RTHTGSQKPFQCRICMRNFSRREHLTIHLRTHTGEKPFQCRICMRNFSRLDMLAR | |
| | HLKTHTGGGGSQKPFQCRICMRNFSQQTNLTRHLRTHTGEKPFQCRICMRNFSV | |
| | AHGLQAHLKTHLRGS | |
| 62 | SRPGERPFQCRICMRNFSQQAHLVRHTRTHTGEKPFQCRICMRNFSVHESLKRH | 1352 |
| | LRTHTGGGGSQKPFQCRICMRNFSKRQYLQVHTRTHTGEKPFQCRICMRNFSDR | |
| | ANLRRHLRTHTGGGGSQKPFQCRICMRNFSRQDNLGRHLRTHTGEKPFQCRIC | |
| | MRNFSRPESLRPHLKTHLRGS | |
| 63 | SRPGERPFQCRICMRNFSRREHLVRHLRTHTGEKPFQCRICMRNFSVNSSLGRHL | 1353 |
| | KTHTGSQKPFQCRICMRNFSKKTNLTRHTRTHTGEKPFQCRICMRNFSDRSVLRR | |
| | HLRTHTGGGGSQKPFQCRICMRNFSRQDNLGRHLRTHTGEKPFQCRICMRNFST | |
| | NHWLLIHLKTHLRGS | |
| 64 | SRPGERPFQCRICMRNFSRQDNLHTHLRTHTGEKPFQCRICMRNFSQGGTLRRH | 1354 |
| | LKTHTGGGGSQKPFQCRICMRNFSDHSSLKRHLRTHTGEKPFQCRICMRNFSQS | |
| | NSLNAHLKTHTGSQKPFQCRICMRNFSRVDHLHRHLRTHTGEKPFQCRICMRNF | |
| | SRRYSLNNHLKTHLRGS | |
| 65 | SRPGERPFQCRICMRNFSRREHLTIHLRTHTGEKPFQCRICMRNFSRLDMLARHL | 1355 |
| | KTHTGSQKPFQCRICMRNFSGHTALRHHTRTHTGEKPFQCRICMRNFSRREVLE | |
| | NHLRTHTGGGGSQKPFQCRICMRNFSHKSSLTRHLRTHTGEKPFQCRICMRNFS | |
| | RPDNLPRHLKTHLRGS | |
| 66 | SRPGERPFQCRICMRNFSRGRNLMLHTRTHTGEKPFQCRICMRNFSQSTTLKRH | 1356 |
| | LRTHTGGGGSQKPFQCRICMRNFSQAGNLVRHLRTHTGEKPFQCRICMRNFSQ | |
| | KVNLGIHLKTHTGSQKPFQCRICMRNFSTNSSLTRHLRTHTGEKPFQCRICMRNF | |
| | SISHNLARHLKTHLRGS | |
| 67 | SRPGERPFQCRICMRNFSRRAHLLSHTRTHTGEKPFQCRICMRNFSEAHHLSRHL | 1357 |
| | RTHTGSQKPFQCRICMRNFSKGNDLTRHTRTHTGEKPFQCRICMRNFSRREHLV | |
| | RHLRTHTGGGGSQKPFQCRICMRNFSRREVLENHLRTHTGEKPFQCRICMRNFS | |
| | QSAHLGRHLKTHLRGS | |
| 68 | SRPGERPFQCRICMRNFSVPSKLLRHTRTHTGEKPFQCRICMRNFSRQDHLTNHL | 1358 |
| | RTHTGSQKPFQCRICMRNFSRREHLTIHLRTHTGEKPFQCRICMRNFSRTDLLGR | |
| | HLKTHTGSQKPFQCRICMRNFSGPTALRHHTRTHTGEKPFQCRICMRNFSRREVL | |
| | ENHLRTHLRGS | |
| 69 | SRPGERPFQCRICMRNFSSPSKLVRHTRTHTGEKPFQCRICMRNFSRQDHLTNHL | 1359 |
| | RTHTGSQKPFQCRICMRNFSRREHLTIHLRTHTGEKPFQCRICMRNFSRLDMLAR | |
| | HLKTHTGGGGSQKPFQCRICMRNFSQQTNLTRHLRTHTGEKPFQCRICMRNFS | |
| | QPHGLAHHLKTHLRGS | |
| 70 | SRPGERPFQCRICMRNFSSPSKLARHTRTHTGEKPFQCRICMRNFSRKDNLACHL | 1360 |
| | RTHTGGGGSQKPFQCRICMRNFSLREPLDRHTRTHTGEKPFQCRICMRNFSDSS | |
| | VLRRHLRTHTGSQKPFQCRICMRNFSQKENLKSHLRTHTGEKPFQCRICMRNFS | |
| | MNHHLKAHLKTHLRGS | |
| 71 | SRPGERPFQCRICMRNFSTSSKLLRHTRTHTGEKPFQCRICMRNFSRKDNLMTHL | 1361 |
| | RTHTGGGGSQKPFQCRICMRNFSLREPLDRHTRTHTGEKPFQCRICMRNFSDSS | |
| | VLRRHLRTHTGSQKPFQCRICMRNFSQKENLKSHLRTHTGEKPFQCRICMRNFS | |
| | QTHHLKSHLKTHLRGS | |
| 72 | SRPGERPFQCRICMRNFSTSSKLLRHTRTHTGEKPFQCRICMRNFSRKDNLMTHL | 1362 |
| | RTHTGGGGSQKPFQCRICMRNFSLREPLDRHTRTHTGEKPFQCRICMRNFSDSS | |
| | VLRRHLRTHTGSQKPFQCRICMRNFSQKCNLQAHLRTHTGEKPFQCRICMRNFS | |
| | MNHHLKAHLKTHLRGS | |
| 73 | SRPGERPFQCRICMRNFSHRTNLIAHTRTHTGEKPFQCRICMRNFSRREHLVRHL | 1363 |
| | RTHTGSQKPFQCRICMRNFSVRHNLTRHLRTHTGEKPFQCRICMRNFSQPHGLA | |
| | HHLKTHTGGGGSQKPFQCRICMRNFSDESNLRRHTRTHTGEKPFQCRICMRNFS | |
| | QKHHLVTHLRTHLRGS | |
| 74 | SRPGERPFQCRICMRNFSHRTNLIAHTRTHTGEKPFQCRICMRNFSRREHLVRHL | 1364 |
| | RTHTGSQKPFQCRICMRNFSVRHNLTRHLRTHTGEKPFQCRICMRNFSQRHGLS | |
| | SHLKTHTGGGGSQKPFQCRICMRNFSDESNLRRHTRTHTGEKPFQCRICMRNFS | |
| | QKHHLVTHLRTHLRGS | |
| 75 | SRPGERPFQCRICMRNFSQSAHLKRHLRTHTGEKPFQCRICMRNFSRLDMLARH | 1365 |
| | LKTHTGGGGSQKPFQCRICMRNFSKKCNLLSHTRTHTGEKPFQCRICMRNFSER | |
| | GNLARHLRTHTGGGGSQKPFQCRICMRNFSQGANLSRHLRTHTGEKPFQCRIC | |
| | MRNFSRRDNLLRHLKTHLRGS | |
| 76 | SRPGERPFQCRICMRNFSQRPHLTNHLRTHTGEKPFQCRICMRNFSRNDLLKRHL | 1366 |
| | KTHTGGGGSQKPFQCRICMRNFSKKCNLLSHTRTHTGEKPFQCRICMRNFSERG | |
| | NLARHLRTHTGGGGSQKPFQCRICMRNFSQQTNLTRHLRTHTGEKPFQCRICMR | |
| | NFSRVDNLPRHLKTHLRGS | |
| 77 | SRPGERPFQCRICMRNFSSPSKLVRHTRTHTGEKPFQCRICMRNFSRNDNLQTHL | 1367 |
| | RTHTGGGGSQKPFQCRICMRNFSLREPLDRHTRTHTGEKPFQCRICMRNFSDSS | |
| | VLRRHLRTHTGSQKPFQCRICMRNFSQKENLKSHLRTHTGEKPFQCRICMRNFS | |
| | QTHHLKSHLKTHLRGS | |
| 78 | SRPGERPFQCRICMRNFSKGNDLTRHTRTHTGEKPFQCRICMRNFSRREHLVRHL | 1368 |
| | RTHTGGGGSQKPFQCRICMRNFSRNFILQRHTRTHTGEKPFQCRICMRNFSQSA | |
| | HLKRHLRTHTGSQKPFQCRICMRNFSQRSDLTRHLRTHTGEKPFQCRICMRNFS | |
| | QGGTLRRHLKTHLRGS | |
| 79 | SRPGERPFQCRICMRNFSLKKDLLRHTRTHTGEKPFQCRICMRNFSRQDNLGRHL | 1369 |
| | RTHTGGGGSQKPFQCRICMRNFSDGSTLNRHTRTHTGEKPFQCRICMRNFSQSA | |
| | HLKRHLRTHTGSQKPFQCRICMRNFSKKDHLHRHTRTHTGEKPFQCRICMRNFSL | |
| | SQTLKRHLRTHLRGS | |
| 80 | SRPGERPFQCRICMRNFSDSGHLKRHLRTHTGEKPFQCRICMRNFSIRHHLKRHL | 1370 |
| | KTHTGGGGSQKPFQCRICMRNFSRRDDLTRHLRTHTGEKPFQCRICMRNFSRLD | |
| | MLARHLKTHTGSQKPFQCRICMRNFSTTTNLRRHTRTHTGEKPFQCRICMRNFS | |
| | RREHLVRHLRTHLRGS | |
| 81 | SRPGERPFQCRICMRNFSRKQHLTLHTRTHTGEKPFQCRICMRNFSDTSVLNRHL | 1371 |
| | RTHTGSQKPFQCRICMRNFSSNLSLKRHTRTHTGEKPFQCRICMRNFSRPEHLLIH | |
| | LRTHTGGGGSQKPFQCRICMRNFSDSPTLRRHTRTHTGEKPFQCRICMRNFSDR | |
| | EVLRRHLRTHLRGS | |
| 82 | SRPGERPFQCRICMRNFSKQHDLVVHTRTHTGEKPFQCRICMRNFSDHSSLKRHL | 1372 |
| | RTHTGGGGSQKPFQCRICMRNFSTHAHLTRHTRTHTGEKPFQCRICMRNFSRQ | |
| | DNLHTHLRTHTGSQKPFQCRICMRNFSTNNNLARHTRTHTGEKPFQCRICMRNF | |
| | SRTDSLTLHLRTHLRGS | |
| 83 | SRPGERPFQCRICMRNFSRRAHLLSHTRTHTGEKPFQCRICMRNFSEAHHLSRHL | 1373 |
| | RTHTGSQKPFQCRICMRNFSKNNDLTRHTRTHTGEKPFQCRICMRNFSRREHLV | |
| | RHLRTHTGSQKPFQCRICMRNFSRREHLTIHLRTHTGEKPFQCRICMRNFSRQDN | |
| | LQRHLKTHLRGS | |
| 84 | SRPGERPFQCRICMRNFSKGNDLTRHTRTHTGEKPFQCRICMRNFSRREHLVRHL | 1374 |
| | RTHTGSQKPFQCRICMRNFSLNKTLQEHTRTHTGEKPFQCRICMRNFSQSTTLKR | |
| | HLRTHTGSQKPFQCRICMRNFSRRRNLTLHTRTHTGEKPFQCRICMRNFSRREHL | |
| | VRHLRTHLRGS | |
| 85 | SRPGERPFQCRICMRNFSKRHTLTRHTRTHTGEKPFQCRICMRNFSQRSSLVRHL | 1375 |
| | RTHTGGGGSQKPFQCRICMRNFSQSGTLHRHLRTHTGEKPFQCRICMRNFSRTE | |
| | HLARHLKTHTGGGGSQKPFQCRICMRNFSQRGNLLRHLRTHTGEKPFQCRICMR | |
| | NFSDQTTLRRHLKTHLRGS | |
| 86 | SRPGERPFQCRICMRNFSRQEHLVRHLRTHTGEKPFQCRICMRNFSDPTSLNRHL | 1376 |
| | KTHTGSQKPFQCRICMRNFSRNIHLQTHTRTHTGEKPFQCRICMRNFSRNEHLA | |
| | NHLRTHTGSQKPFQCRICMRNFSEASNLRRHTRTHTGEKPFQCRICMRNFSLKEH | |
| | LTRHLRTHLRGS | |
| 87 | SRPGERPFQCRICMRNFSDSGHLKRHLRTHTGEKPFQCRICMRNFSIRHHLKRHL | 1377 |
| | KTHTGGGGSQKPFQCRICMRNFSRTDTLARHLRTHTGEKPFQCRICMRNFSRLD | |
| | MLARHLKTHTGSQKPFQCRICMRNFSQTQNLTRHLRTHTGEKPFQCRICMRNFS | |
| | RTEHLARHLKTHLRGS | |
| 88 | SRPGERPFQCRICMRNFSRGSHLQQHTRTHTGEKPFQCRICMRNFSQSGHLKAH | 1378 |
| | LRTHTGSQKPFQCRICMRNFSTRSKLDRHTRTHTGEKPFQCRICMRNFSQRSSLV | |
| | RHLRTHTGSQKPFQCRICMRNFSDSSVLRRHLRTHTGEKPFQCRICMRNFSEGG | |
| | ALRRHLKTHLRGS | |
| 89 | SRPGERPFQCRICMRNFSQSPHLKRHLRTHTGEKPFQCRICMRNFSRTEHLARHL | 1379 |
| | KTHTGSQKPFQCRICMRNFSTNSSLTRHLRTHTGEKPFQCRICMRNFSREDNLGR | |
| | HLKTHTGSQKPFQCRICMRNFSSDRRDLDHTRTHTGEKPFQCRICMRNFSSFQSY | |
| | LEHLRTHLRGS | |
| 90 | SRPGERPFQCRICMRNFSVPSKLLRHTRTHTGEKPFQCRICMRNFSQRSSLVRHL | 1380 |
| | RTHTGGGGSQKPFQCRICMRNFSKGNDLTRHTRTHTGEKPFQCRICMRNFSRRE | |
| | HLVRHLRTHTGSQKPFQCRICMRNFSRAEHLAIHLRTHTGEKPFQCRICMRNFSR | |
| | RDNLNRHLKTHLRGS | |
| 91 | SRPGERPFQCRICMRNFSKNNDLTRHTRTHTGEKPFQCRICMRNFSRREHLVRHL | 1381 |
| | RTHTGSQKPFQCRICMRNFSLKKTLKEHTRTHTGEKPFQCRICMRNFSQSTTLKR | |
| | HLRTHTGSQKPFQCRICMRNFSRRRNLTLHTRTHTGEKPFQCRICMRNFSRREHL | |
| | VRHLRTHLRGS | |
| 92 | SRPGERPFQCRICMRNFSRNHTLTRHTRTHTGEKPFQCRICMRNFSQRSSLVRHL | 1382 |
| | RTHTGGGGSQKPFQCRICMRNFSQSGTLHRHLRTHTGEKPFQCRICMRNFSRTE | |
| | HLARHLKTHTGGGGSQKPFQCRICMRNFSQRGNLLRHLRTHTGEKPFQCRICMR | |
| | NFSDQTTLRRHLKTHLRGS | |
| 93 | SRPGERPFQCRICMRNFSRGEHLTRHLRTHTGEKPFQCRICMRNFSEPTSLIRHLK | 1383 |
| | THTGSQKPFQCRICMRNFSRNIHLQTHTRTHTGEKPFQCRICMRNFSRNEHLAN | |
| | HLRTHTGSQKPFQCRICMRNFSEASNLRRHTRTHTGEKPFQCRICMRNFSLKEHL | |
| | TRHLRTHLRGS | |
| 94 | SRPGERPFQCRICMRNFSTNSKLTRHTRTHTGEKPFQCRICMRNFSEAHHLSRHL | 1384 |
| | RTHTGGGGSQKPFQCRICMRNFSRRDDLTRHLRTHTGEKPFQCRICMRNFSRLD | |
| | MLARHLKTHTGSQKPFQCRICMRNFSQTQNLTRHLRTHTGEKPFQCRICMRNFS | |
| | RTEHLARHLKTHLRGS | |
| 95 | SRPGERPFQCRICMRNFSRGSHLQQHTRTHTGEKPFQCRICMRNFSQSGHLKAH | 1385 |
| | LRTHTGSQKPFQCRICMRNFSLKEHLTRHLRTHTGEKPFQCRICMRNFSQTQSLQ | |
| | RHLKTHTGSQKPFQCRICMRNFSDSPTLRRHTRTHTGEKPFQCRICMRNFSDHSS | |
| | LKRHLRTHLRGS | |
| 96 | SRPGERPFQCRICMRNFSRADNLGRHLRTHTGEKPFQCRICMRNFSRMEHLPRH | 1386 |
| | LKTHTGGGGSQKPFQCRICMRNFSHKSSLTRHLRTHTGEKPFQCRICMRNFSRPD | |
| | NLPRHLKTHTGSQKPFQCRICMRNFSSDRRDLDHTRTHTGEKPFQCRICMRNFSS | |
| | FQSYLEHLRTHLRGS | |
| 97 | SRPGERPFQCRICMRNFSLKEHLTRHLRTHTGEKPFQCRICMRNFSQTQSLQRHL | 1387 |
| | KTHTGGGGSQKPFQCRICMRNFSKNNDLTRHTRTHTGEKPFQCRICMRNFSRRE | |
| | HLVRHLRTHTGSQKPFQCRICMRNFSRREHLTIHLRTHTGEKPFQCRICMRNFSR | |
| | RDNLNRHLKTHLRGS | |
| 98 | SRPGERPFQCRICMRNFSLSQTLKRHTRTHTGEKPFQCRICMRNFSRTDTLARHL | 1388 |
| | RTHTGGGGSQKPFQCRICMRNFSRKRNLIMHTRTHTGEKPFQCRICMRNFSDHS | |
| | SLKRHLRTHTGGGGSQKPFQCRICMRNFSDSSVLRRHLRTHTGEKPFQCRICMR | |
| | NFSQGQNLTIHLKTHLRGS | |
| 99 | SRPGERPFQCRICMRNFSRSNTLARHTRTHTGEKPFQCRICMRNFSQRSSLVRHL | 1389 |
| | RTHTGGGGSQKPFQCRICMRNFSQSTTLKRHLRTHTGEKPFQCRICMRNFSRTE | |
| | HLARHLKTHTGGGGSQKPFQCRICMRNFSQRGNLLRHLRTHTGEKPFQCRICMR | |
| | NFSDQTTLRRHLKTHLRGS | |
| 100 | SRPGERPFQCRICMRNFSRQEHLVRHLRTHTGEKPFQCRICMRNFSDPTSLNRHL | 1390 |
| | KTHTGSQKPFQCRICMRNFSRNIHLQTHTRTHTGEKPFQCRICMRNFSRNEHLA | |
| | NHLRTHTGSQKPFQCRICMRNFSDPSNLRRHTRTHTGEKPFQCRICMRNFSLKE | |
| | HLTRHLRTHLRGS | |
| 101 | SRPGERPFQCRICMRNFSSPSKLVRHTRTHTGEKPFQCRICMRNFSLPHHLQRHL | 1391 |
| | RTHTGGGGSQKPFQCRICMRNFSRTDTLARHLRTHTGEKPFQCRICMRNFSRLD | |
| | MLARHLKTHTGSQKPFQCRICMRNFSQTQNLTRHLRTHTGEKPFQCRICMRNFS | |
| | RTEHLARHLKTHLRGS | |
| 102 | SRPGERPFQCRICMRNFSRKTHLQQHTRTHTGEKPFQCRICMRNFSQSGHLKAH | 1392 |
| | LRTHTGSQKPFQCRICMRNFSTRSKLDRHTRTHTGEKPFQCRICMRNFSQRSSLV | |
| | RHLRTHTGSQKPFQCRICMRNFSDSPTLRRHTRTHTGEKPFQCRICMRNFSDHSS | |
| | LKRHLRTHLRGS | |
| 103 | SRPGERPFQCRICMRNFSREDNLDRHLRTHTGEKPFQCRICMRNFSRRHGLGRH | 1393 |
| | LKTHTGGGGSQKPFQCRICMRNFSHKSSLTRHLRTHTGEKPFQCRICMRNFSRPD | |
| | NLPRHLKTHTGSQKPFQCRICMRNFSSDRRDLDHTRTHTGEKPFQCRICMRNFSS | |
| | FQSYLEHLRTHLRGS | |
| 104 | SRPGERPFQCRICMRNFSLKEHLTRHLRTHTGEKPFQCRICMRNFSQTQSLQRHL | 1394 |
| | KTHTGGGGSQKPFQCRICMRNFSKNNDLTRHTRTHTGEKPFQCRICMRNFSRRE | |
| | HLVRHLRTHTGSQKPFQCRICMRNFSRKEHLVGHLRTHTGEKPFQCRICMRNFS | |
| | RGDNLNRHLKTHLRGS | |
| 105 | SRPGERPFQCRICMRNFSKRHTLTRHTRTHTGEKPFQCRICMRNFSQRSSLVRHL | 1395 |
| | RTHTGGGGSQKPFQCRICMRNFSQSTTLKRHLRTHTGEKPFQCRICMRNFSRTE | |
| | HLARHLKTHTGGGGSQKPFQCRICMRNFSQRGNLARHLRTHTGEKPFQCRICM | |
| | RNFSDKSVLARHLKTHLRGS | |
| 106 | SRPGERPFQCRICMRNFSQSAHLKRHLRTHTGEKPFQCRICMRNFSRGDSLKKHL | 1396 |
| | KTHTGGGGSQKPFQCRICMRNFSRNIHLQTHTRTHTGEKPFQCRICMRNFSRNE | |
| | HLANHLRTHTGSQKPFQCRICMRNFSDPSNLRRHTRTHTGEKPFQCRICMRNFS | |
| | LKEHLTRHLRTHLRGS | |
| 107 | SRPGERPFQCRICMRNFSRHQHLKLHTRTHTGEKPFQCRICMRNFSDPTVLKRHL | 1397 |
| | RTHTGSQKPFQCRICMRNFSASAGLTRHTRTHTGEKPFQCRICMRNFSRPESLTI | |
| | HLRTHTGGGGSQKPFQCRICMRNFSLKKDLLRHTRTHTGEKPFQCRICMRNFSD | |
| | HSSLKRHLRTHLRGS | |
| 108 | SRPGERPFQCRICMRNFSRKTHLQQHTRTHTGEKPFQCRICMRNFSQSGHLKAH | 1398 |
| | LRTHTGSQKPFQCRICMRNFSTRSKLDRHTRTHTGEKPFQCRICMRNFSQRSSLV | |
| | RHLRTHTGSQKPFQCRICMRNFSLKKDLLRHTRTHTGEKPFQCRICMRNFSDHSS | |
| | LKRHLRTHLRGS | |
| 109 | SRPGERPFQCRICMRNFSRADNLGRHLRTHTGEKPFQCRICMRNFSRMEHLPRH | 1399 |
| | LKTHTGGGGSQKPFQCRICMRNFSHKSSLTRHLRTHTGEKPFQCRICMRNFSRPD | |
| | NLPRHLKTHTGSQKPFQCRICMRNFSDARGLLRHTRTHTGEKPFQCRICMRNFSF | |
| | HSYLQKHLRTHLRGS | |
| 110 | SRPGERPFQCRICMRNFSLKEHLTRHLRTHTGEKPFQCRICMRNFSQTQSLQRHL | 1400 |
| | KTHTGGGGSQKPFQCRICMRNFSKGNDLTRHTRTHTGEKPFQCRICMRNFSRRE | |
| | HLVRHLRTHTGSQKPFQCRICMRNFSRREHLTIHLRTHTGEKPFQCRICMRNFSR | |
| | RDNLNRHLKTHLRGS | |
| 111 | SRPGERPFQCRICMRNFSLKKDLLRHTRTHTGEKPFQCRICMRNFSRQDNLGRHL | 1401 |
| | RTHTGGGGSQKPFQCRICMRNFSDGSTLNRHTRTHTGEKPFQCRICMRNFSQSA | |
| | HLKRHLRTHTGSQKPFQCRICMRNFSRREHLVRHLRTHTGEKPFQCRICMRNFSV | |
| | SNSLARHLKTHLRGS | |
| 112 | SRPGERPFQCRICMRNFSQSAHLKRHLRTHTGEKPFQCRICMRNFSRKDSLMVH | 1402 |
| | LKTHTGGGGSQKPFQCRICMRNFSRNIHLQTHTRTHTGEKPFQCRICMRNFSRN | |
| | EHLANHLRTHTGSQKPFQCRICMRNFSEASNLRRHTRTHTGEKPFQCRICMRNF | |
| | SLKEHLTRHLRTHLRGS | |
| 113 | SRPGERPFQCRICMRNFSRHQHLKLHTRTHTGEKPFQCRICMRNFSDPTVLKRHL | 1403 |
| | RTHTGSQKPFQCRICMRNFSASAGLTRHTRTHTGEKPFQCRICMRNFSRPESLTI | |
| | HLRTHTGGGGSQKPFQCRICMRNFSDSPTLRRHTRTHTGEKPFQCRICMRNFSD | |
| | HSSLKRHLRTHLRGS | |
| 114 | SRPGERPFQCRICMRNFSRKTHLQQHTRTHTGEKPFQCRICMRNFSQSGHLKAH | 1404 |
| | LRTHTGSQKPFQCRICMRNFSLKEHLTRHLRTHTGEKPFQCRICMRNFSQTQSLQ | |
| | RHLKTHTGSQKPFQCRICMRNFSLKKDLLRHTRTHTGEKPFQCRICMRNFSDHSS | |
| | LKRHLRTHLRGS | |
| 115 | SRPGERPFQCRICMRNFSRNTNLTRHTRTHTGEKPFQCRICMRNFSRREHLVRHL | 1405 |
| | RTHTGGGGSQKPFQCRICMRNFSHKSSLTRHLRTHTGEKPFQCRICMRNFSRPD | |
| | NLPRHLKTHTGSQKPFQCRICMRNFSSDRRDLDHTRTHTGEKPFQCRICMRNFSS | |
| | FQSYLEHLRTHLRGS | |
| 116 | SRPGERPFQCRICMRNFSKNNDLTRHTRTHTGEKPFQCRICMRNFSRREHLVRHL | 1406 |
| | RTHTGSQKPFQCRICMRNFSLNKTLVEHTRTHTGEKPFQCRICMRNFSQSGTLKR | |
| | HLRTHTGSQKPFQCRICMRNFSRRRNLTLHTRTHTGEKPFQCRICMRNFSRREHL | |
| | VRHLRTHLRGS | |
| 117 | SRPGERPFQCRICMRNFSDSPTLRRHTRTHTGEKPFQCRICMRNFSRQDNLGRH | 1407 |
| | LRTHTGGGGSQKPFQCRICMRNFSDSPTLRRHTRTHTGEKPFQCRICMRNFSQS | |
| | AHLKRHLRTHTGSQKPFQCRICMRNFSRREHLVRHLRTHTGEKPFQCRICMRNFS | |
| | VSNSLARHLKTHLRGS | |
| 118 | SRPGERPFQCRICMRNFSTNSKLTRHTRTHTGEKPFQCRICMRNFSEAHHLSRHL | 1408 |
| | RTHTGGGGSQKPFQCRICMRNFSRTDTLARHLRTHTGEKPFQCRICMRNFSRLD | |
| | MLARHLKTHTGSQKPFQCRICMRNFSTTTNLRRHTRTHTGEKPFQCRICMRNFS | |
| | RREHLVRHLRTHLRGS | |
| 119 | SRPGERPFQCRICMRNFSRHQHLKLHTRTHTGEKPFQCRICMRNFSDPTVLKRHL | 1409 |
| | RTHTGSQKPFQCRICMRNFSSNLSLKRHTRTHTGEKPFQCRICMRNFSRPEHLLIH | |
| | LRTHTGGGGSQKPFQCRICMRNFSLKKDLLRHTRTHTGEKPFQCRICMRNFSDH | |
| | SSLKRHLRTHLRGS | |
| 120 | SRPGERPFQCRICMRNFSKQDHLSVHTRTHTGEKPFQCRICMRNFSQSGHLKAH | 1410 |
| | LRTHTGSQKPFQCRICMRNFSTRSKLDRHTRTHTGEKPFQCRICMRNFSQRSSLV | |
| | RHLRTHTGSQKPFQCRICMRNFSDSSVLRRHLRTHTGEKPFQCRICMRNFSEGG | |
| | ALRRHLKTHLRGS | |
| 121 | SRPGERPFQCRICMRNFSRNTNLTRHTRTHTGEKPFQCRICMRNFSRREHLVRHL | 1411 |
| | RTHTGGGGSQKPFQCRICMRNFSMTSSLRRHTRTHTGEKPFQCRICMRNFSRQ | |
| | DNLGRHLRTHTGSQKPFQCRICMRNFSSDRRDLDHTRTHTGEKPFQCRICMRNF | |
| | SSFQSYLEHLRTHLRGS | |
| 122 | SRPGERPFQCRICMRNFSKNNDLTRHTRTHTGEKPFQCRICMRNFSRREHLVRHL | 1412 |
| | RTHTGSQKPFQCRICMRNFSLNKTLQEHTRTHTGEKPFQCRICMRNFSQSTTLKR | |
| | HLRTHTGSQKPFQCRICMRNFSRRRNLTLHTRTHTGEKPFQCRICMRNFSRREHL | |
| | VRHLRTHLRGS | |
| 123 | SRPGERPFQCRICMRNFSVRKDLTRHTRTHTGEKPFQCRICMRNFSRQDNLGRH | 1413 |
| | LRTHTGGGGSQKPFQCRICMRNFSDGSTLNRHTRTHTGEKPFQCRICMRNFSQS | |
| | AHLKRHLRTHTGSQKPFQCRICMRNFSRREHLVRHLRTHTGEKPFQCRICMRNFS | |
| | VSNSLARHLKTHLRGS | |
| 124 | SRPGERPFQCRICMRNFSTNSKLTRHTRTHTGEKPFQCRICMRNFSEAHHLSRHL | 1414 |
| | RTHTGGGGSQKPFQCRICMRNFSRTDTLARHLRTHTGEKPFQCRICMRNFSRLD | |
| | MLARHLKTHTGSQKPFQCRICMRNFSQTQNLTRHLRTHTGEKPFQCRICMRNFS | |
| | RTEHLARHLKTHLRGS | |
| 125 | SRPGERPFQCRICMRNFSRKQHLQLHTRTHTGEKPFQCRICMRNFSDKSVLRRHL | 1415 |
| | RTHTGSQKPFQCRICMRNFSASAGLTRHTRTHTGEKPFQCRICMRNFSRPESLTI | |
| | HLRTHTGGGGSQKPFQCRICMRNFSLKKDLLRHTRTHTGEKPFQCRICMRNFSD | |
| | HSSLKRHLRTHLRGS | |
| 126 | SRPGERPFQCRICMRNFSKQHDLVVHTRTHTGEKPFQCRICMRNFSDHSSLKRHL | 1416 |
| | RTHTGGGGSQKPFQCRICMRNFSTHAHLTRHTRTHTGEKPFQCRICMRNFSRRD | |
| | NLHTHLRTHTGSQKPFQCRICMRNFSTNNNLARHTRTHTGEKPFQCRICMRNFS | |
| | RTDSLTLHLRTHLRGS | |
| 127 | SRPGERPFQCRICMRNFSRRAHLLSHTRTHTGEKPFQCRICMRNFSEAHHLSRHL | 1417 |
| | RTHTGSQKPFQCRICMRNFSKNNDLTRHTRTHTGEKPFQCRICMRNFSRREHLV | |
| | RHLRTHTGSQKPFQCRICMRNFSRREHLTIHLRTHTGEKPFQCRICMRNFSRRDN | |
| | LNRHLKTHLRGS | |
| 128 | SRPGERPFQCRICMRNFSKGNDLTRHTRTHTGEKPFQCRICMRNFSRREHLVRHL | 1418 |
| | RTHTGSQKPFQCRICMRNFSLNKTLVEHTRTHTGEKPFQCRICMRNFSQSGTLKR | |
| | HLRTHTGSQKPFQCRICMRNFSRSRNLTLHTRTHTGEKPFQCRICMRNFSRREHL | |
| | VRHLRTHLRGS | |
| 129 | SRPGERPFQCRICMRNFSDRSNLTRHLRTHTGEKPFQCRICMRNFSRPDALPRHL | 1419 |
| | KTHTGSQKPFQCRICMRNFSTPSKLLRHTRTHTGEKPFQCRICMRNFSDSSVLRR | |
| | HLRTHTGSQKPFQCRICMRNFSDSSVLRRHLRTHTGEKPFQCRICMRNFSENSKL | |
| | NRHLKTHLRGS | |
| 130 | SRPGERPFQCRICMRNFSQNQNLARHLRTHTGEKPFQCRICMRNFSDKSVLARH | 1420 |
| | LKTHTGSQKPFQCRICMRNFSRADNLGRHLRTHTGEKPFQCRICMRNFSKQVTL | |
| | RNHLKTHTGGGGSQKPFQCRICMRNFSQSAHLKRHLRTHTGEKPFQCRICMRNF | |
| | SRSDHLSLHLKTHLRGS | |
| 131 | SRPGERPFQCRICMRNFSYKHVLVNHTRTHTGEKPFQCRICMRNFSQMSNLDRH | 1421 |
| | LRTHTGSQKPFQCRICMRNFSQAETLKRHLRTHTGEKPFQCRICMRNFSRNWDL | |
| | TQHLKTHTGGGGSQKPFQCRICMRNFSRREHLVRHLRTHTGEKPFQCRICMRNF | |
| | SVDHHLRRHLKTHLRGS | |
| 132 | SRPGERPFQCRICMRNFSHRTNLIAHTRTHTGEKPFQCRICMRNFSRREHLVRHL | 1422 |
| | RTHTGSQKPFQCRICMRNFSVRHNLTRHLRTHTGEKPFQCRICMRNFSQPHGLA | |
| | HHLKTHTGGGGSQKPFQCRICMRNFSDESNLRRHTRTHTGEKPFQCRICMRNFS | |
| | QSHSLKSHLRTHLRGS | |
| 133 | SRPGERPFQCRICMRNFSTKQKLQTHTRTHTGEKPFQCRICMRNFSRTDTLARHL | 1423 |
| | RTHTGSQKPFQCRICMRNFSTKQRLTVHTRTHTGEKPFQCRICMRNFSQKQNLK | |
| | THLRTHTGGGGSQKPFQCRICMRNFSRRHGLDRHTRTHTGEKPFQCRICMRNFS | |
| | QRSDLTRHLRTHLRGS | |
| 134 | SRPGERPFQCRICMRNFSHRTNLIAHTRTHTGEKPFQCRICMRNFSRREHLVRHL | 1424 |
| | RTHTGSQKPFQCRICMRNFSVRHNLTRHLRTHTGEKPFQCRICMRNFSQPHGLA | |
| | HHLKTHTGGGGSQKPFQCRICMRNFSELSNLRRHTRTHTGEKPFQCRICMRNFS | |
| | QSHSLKSHLRTHLRGS | |
| 135 | SRPGERPFQCRICMRNFSSTWKLTTHTRTHTGEKPFQCRICMRNFSEQGHLTRHL | 1425 |
| | RTHTGSQKPFQCRICMRNFSRREVLENHLRTHTGEKPFQCRICMRNFSRADGLQ | |
| | LHLKTHTGGGGSQKPFQCRICMRNFSQGGNLTRHLRTHTGEKPFQCRICMRNFS | |
| | QSQNLKHHLKTHLRGS | |
| 136 | SRPGERPFQCRICMRNFSQRPHLTNHLRTHTGEKPFQCRICMRNFSRNDLLKRHL | 1426 |
| | KTHTGGGGSQKPFQCRICMRNFSKKFNLQAHTRTHTGEKPFQCRICMRNFSDPS | |
| | NLARHLRTHTGGGGSQKPFQCRICMRNFSQQTNLTRHLRTHTGEKPFQCRICMR | |
| | NFSRVDNLPRHLKTHLRGS | |
| 137 | SRPGERPFQCRICMRNFSKGDHLRRHTRTHTGEKPFQCRICMRNFSQRCNLLTHL | 1427 |
| | RTHTGSQKPFQCRICMRNFSQKTHLAVHLRTHTGEKPFQCRICMRNFSQNSHLR | |
| | RHLKTHTGSQKPFQCRICMRNFSQQAHLVRHTRTHTGEKPFQCRICMRNFSQAE | |
| | TLKRHLRTHLRGS | |
| 138 | SRPGERPFQCRICMRNFSQSAHLKRHLRTHTGEKPFQCRICMRNFSRLDMLARH | 1428 |
| | LKTHTGGGGSQKPFQCRICMRNFSKKCNLLSHTRTHTGEKPFQCRICMRNFSER | |
| | GNLARHLRTHTGGGGSQKPFQCRICMRNFSQHINLTRHLRTHTGEKPFQCRICM | |
| | RNFSRRDNLLRHLKTHLRGS | |
| 139 | SRPGERPFQCRICMRNFSKHDHLARHTRTHTGEKPFQCRICMRNFSQQGNLVTH | 1429 |
| | LRTHTGSQKPFQCRICMRNFSQKVHLQVHLRTHTGEKPFQCRICMRNFSQNSHL | |
| | RRHLKTHTGSQKPFQCRICMRNFSQQAHLVRHTRTHTGEKPFQCRICMRNFSQA | |
| | ETLKRHLRTHLRGS | |
| 140 | SRPGERPFQCRICMRNFSKHSNLTRHTRTHTGEKPFQCRICMRNFSRREHLTIHLR | 1430 |
| | THTGGGGSQKPFQCRICMRNFSKKDHLHRHTRTHTGEKPFQCRICMRNFSQTTT | |
| | LKRHLRTHTGSQKPFQCRICMRNFSEEHHLTRHLRTHTGEKPFQCRICMRNFSRE | |
| | DVLGRHLKTHLRGS | |
| 141 | SRPGERPFQCRICMRNFSQQAHLVRHTRTHTGEKPFQCRICMRNFSQAETLKRH | 1431 |
| | LRTHTGSQKPFQCRICMRNFSRKQHLTLHTRTHTGEKPFQCRICMRNFSDRGNL | |
| | TRHLRTHTGSQKPFQCRICMRNFSRPHNLLRHTRTHTGEKPFQCRICMRNFSRRE | |
| | HLVRHLRTHLRGS | |
| 142 | SRPGERPFQCRICMRNFSRQHHLTYHTRTHTGEKPFQCRICMRNFSRTDTLARHL | 1432 |
| | RTHTGSQKPFQCRICMRNFSGPTALRHHTRTHTGEKPFQCRICMRNFSRREVLE | |
| | NHLRTHTGGGGSQKPFQCRICMRNFSHKSSLTRHLRTHTGEKPFQCRICMRNFS | |
| | RIDNLIRHLKTHLRGS | |
| 143 | SRPGERPFQCRICMRNFSKKCHLVTHTRTHTGEKPFQCRICMRNFSRRDILGRHL | 1433 |
| | RTHTGSQKPFQCRICMRNFSGHTALRHHTRTHTGEKPFQCRICMRNFSRREVLE | |
| | NHLRTHTGGGGSQKPFQCRICMRNFSHKSSLTRHLRTHTGEKPFQCRICMRNFS | |
| | RPDNLPRHLKTHLRGS | |
| 144 | SRPGERPFQCRICMRNFSRQHHLTYHTRTHTGEKPFQCRICMRNFSRTDTLARHL | 1434 |
| | RTHTGGGGSQKPFQCRICMRNFSLRANLQRHTRTHTGEKPFQCRICMRNFSQP | |
| | HSLAVHLRTHTGSQKPFQCRICMRNFSHKSSLTRHLRTHTGEKPFQCRICMRNFS | |
| | RIDNLIRHLKTHLRGS | |
| 145 | SRPGERPFQCRICMRNFSKKCHLVTHTRTHTGEKPFQCRICMRNFSRRDILGRHL | 1435 |
| | RTHTGGGGSQKPFQCRICMRNFSQQTNLTRHLRTHTGEKPFQCRICMRNFSVA | |
| | HGLQAHLKTHTGSQKPFQCRICMRNFSHKSSLTRHLRTHTGEKPFQCRICMRNFS | |
| | RIDNLIRHLKTHLRGS | |
| 146 | SRPGERPFQCRICMRNFSRARNLTLHTRTHTGEKPFQCRICMRNFSQSTTLKRHL | 1436 |
| | RTHTGGGGSQKPFQCRICMRNFSQAGNLVRHLRTHTGEKPFQCRICMRNFSQK | |
| | VNLGIHLKTHTGSQKPFQCRICMRNFSTNSSLTRHLRTHTGEKPFQCRICMRNFSI | |
| | SHNLARHLKTHLRGS | |
| 147 | SRPGERPFQCRICMRNFSDSSVLRRHLRTHTGEKPFQCRICMRNFSQGGTLRRHL | 1437 |
| | KTHTGSQKPFQCRICMRNFSRREHLVRHLRTHTGEKPFQCRICMRNFSRRDNLN | |
| | RHLKTHTGGGGSQKPFQCRICMRNFSRQDNLHTHLRTHTGEKPFQCRICMRNFS | |
| | QGGTLRRHLKTHLRGS | |
| 148 | SRPGERPFQCRICMRNFSSPSKLVRHTRTHTGEKPFQCRICMRNFSRKDHLTTHL | 1438 |
| | RTHTGSQKPFQCRICMRNFSRREHLTIHLRTHTGEKPFQCRICMRNFSRLDMLAR | |
| | HLKTHTGSQKPFQCRICMRNFSGHTALRHHTRTHTGEKPFQCRICMRNFSRREV | |
| | LENHLRTHLRGS | |
| 149 | SRPGERPFQCRICMRNFSKHHTLQRHTRTHTGEKPFQCRICMRNFSRREHLVRHL | 1439 |
| | RTHTGGGGSQKPFQCRICMRNFSRQHHLTYHTRTHTGEKPFQCRICMRNFSRTD | |
| | TLARHLRTHTGSQKPFQCRICMRNFSGPTALRHHTRTHTGEKPFQCRICMRNFSR | |
| | REVLENHLRTHLRGS | |
| 150 | SRPGERPFQCRICMRNFSQQTNLTRHLRTHTGEKPFQCRICMRNFSANRTLVHH | 1440 |
| | LKTHTGGGGSQKPFQCRICMRNFSDRGNLTRHLRTHTGEKPFQCRICMRNFSRK | |
| | TGLLIHLKTHTGGGGSQKPFQCRICMRNFSRREVLENHLRTHTGEKPFQCRICMR | |
| | NFSRRDNLNRHLKTHLRGS | |
| 151 | SRPGERPFQCRICMRNFSDHSSLKRHLRTHTGEKPFQCRICMRNFSQSNTLSDHL | 1441 |
| | KTHTGSQKPFQCRICMRNFSRVDHLHRHLRTHTGEKPFQCRICMRNFSRSHTLTS | |
| | HLKTHTGSQKPFQCRICMRNFSTNLTLVRHTRTHTGEKPFQCRICMRNFSQGGTL | |
| | NRHLRTHLRGS | |
| 152 | SRPGERPFQCRICMRNFSDHSSLKRHLRTHTGEKPFQCRICMRNFSQSNTLRSHL | 1442 |
| | KTHTGSQKPFQCRICMRNFSRVDHLHRHLRTHTGEKPFQCRICMRNFSRSHTLTS | |
| | HLKTHTGSQKPFQCRICMRNFSTPQVLRRHTRTHTGEKPFQCRICMRNFSQGGT | |
| | LNRHLRTHLRGS | |
| 153 | SRPGERPFQCRICMRNFSRVDHLHRHLRTHTGEKPFQCRICMRNFSQAATLQRH | 1443 |
| | LKTHTGSQKPFQCRICMRNFSRREHLVRHLRTHTGEKPFQCRICMRNFSRPDALP | |
| | RHLKTHTGSQKPFQCRICMRNFSQSAHLKRHLRTHTGEKPFQCRICMRNFSVGN | |
| | SLSRHLKTHLRGS | |
| 154 | SRPGERPFQCRICMRNFSRQEHLVRHLRTHTGEKPFQCRICMRNFSEGGNLMRH | 1444 |
| | LKTHTGSQKPFQCRICMRNFSKKDHLHRHTRTHTGEKPFQCRICMRNFSRREVLE | |
| | NHLRTHTGSQKPFQCRICMRNFSQSAHLKRHLRTHTGEKPFQCRICMRNFSLKH | |
| | DLRRHLKTHLRGS | |
| 155 | SRPGERPFQCRICMRNFSQGGTLRRHLRTHTGEKPFQCRICMRNFSQTAHLQTH | 1445 |
| | LKTHTGSQKPFQCRICMRNFSRQDNLGRHLRTHTGEKPFQCRICMRNFSKNVSL | |
| | QWHLKTHTGGGGSQKPFQCRICMRNFSKQHDLVVHTRTHTGEKPFQCRICMR | |
| | NFSDHSSLKRHLRTHLRGS | |
| 156 | SRPGERPFQCRICMRNFSQGGTLRRHLRTHTGEKPFQCRICMRNFSQTAHLQTH | 1446 |
| | LKTHTGSQKPFQCRICMRNFSRPDNLARHLRTHTGEKPFQCRICMRNFSKRVSLE | |
| | HHLKTHTGGGGSQKPFQCRICMRNFSRRVTLTRHTRTHTGEKPFQCRICMRNFS | |
| | ESSVLIRHLRTHLRGS | |
| 157 | SRPGERPFQCRICMRNFSQRSDLTRHLRTHTGEKPFQCRICMRNFSRRDGLNGH | 1447 |
| | LKTHTGSQKPFQCRICMRNFSRQEHLVRHLRTHTGEKPFQCRICMRNFSEGGNL | |
| | MRHLKTHTGSQKPFQCRICMRNFSKKDHLHRHTRTHTGEKPFQCRICMRNFSRR | |
| | EVLENHLRTHLRGS | |
| 158 | SRPGERPFQCRICMRNFSQSPHLKRHLRTHTGEKPFQCRICMRNFSQSTSLQRHL | 1448 |
| | KTHTGGGGSQKPFQCRICMRNFSRKECLTIHLRTHTGEKPFQCRICMRNFSQNS | |
| | HLRRHLKTHTGSQKPFQCRICMRNFSQSAHLKRHLRTHTGEKPFQCRICMRNFS | |
| | RSDHLSLHLKTHLRGS | |
| 159 | SRPGERPFQCRICMRNFSRNHNLERHTRTHTGEKPFQCRICMRNFSRREHLTIHL | 1449 |
| | RTHTGGGGSQKPFQCRICMRNFSKKDHLHRHTRTHTGEKPFQCRICMRNFSQTT | |
| | TLKRHLRTHTGSQKPFQCRICMRNFSEEHHLTRHLRTHTGEKPFQCRICMRNFSR | |
| | EDVLGRHLKTHLRGS | |
| 160 | SRPGERPFQCRICMRNFSKKCHLVTHTRTHTGEKPFQCRICMRNFSRRDILGRHL | 1450 |
| | RTHTGGGGSQKPFQCRICMRNFSLRANLQRHTRTHTGEKPFQCRICMRNFSQP | |
| | HSLAVHLRTHTGSQKPFQCRICMRNFSHKSSLTRHLRTHTGEKPFQCRICMRNFS | |
| | RIDNLIRHLKTHLRGS | |
| 161 | SRPGERPFQCRICMRNFSRRAHLLSHTRTHTGEKPFQCRICMRNFSEAHHLSRHL | 1451 |
| | RTHTGSQKPFQCRICMRNFSKNNDLTRHTRTHTGEKPFQCRICMRNFSRREHLV | |
| | RHLRTHTGGGGSQKPFQCRICMRNFSRREVLENHLRTHTGEKPFQCRICMRNFS | |
| | QSAHLGRHLKTHLRGS | |
| 162 | SRPGERPFQCRICMRNFSSPSKLVRHTRTHTGEKPFQCRICMRNFSRQDHLTNHL | 1452 |
| | RTHTGSQKPFQCRICMRNFSRQHHLTYHTRTHTGEKPFQCRICMRNFSRTDTLA | |
| | RHLRTHTGSQKPFQCRICMRNFSGHTALRHHTRTHTGEKPFQCRICMRNFSRRE | |
| | VLENHLRTHLRGS | |
| 163 | SRPGERPFQCRICMRNFSRTNDLARHTRTHTGEKPFQCRICMRNFSRREHLVRHL | 1453 |
| | RTHTGGGGSQKPFQCRICMRNFSRREHLTIHLRTHTGEKPFQCRICMRNFSRTDL | |
| | LGRHLKTHTGSQKPFQCRICMRNFSGPTALRHHTRTHTGEKPFQCRICMRNFSR | |
| | REVLENHLRTHLRGS | |
| 164 | SRPGERPFQCRICMRNFSRSNTLARHTRTHTGEKPFQCRICMRNFSQRSSLVRHL | 1454 |
| | RTHTGGGGSQKPFQCRICMRNFSQSGTLHRHLRTHTGEKPFQCRICMRNFSRTE | |
| | HLARHLKTHTGGGGSQKPFQCRICMRNFSQRGNLARHLRTHTGEKPFQCRICM | |
| | RNFSDKSVLARHLKTHLRGS | |
| 165 | SRPGERPFQCRICMRNFSDSPTLRRHTRTHTGEKPFQCRICMRNFSRQDNLGRH | 1455 |
| | LRTHTGGGGSQKPFQCRICMRNFSDPSVLTRHLRTHTGEKPFQCRICMRNFSQN | |
| | SHLRRHLKTHTGSQKPFQCRICMRNFSKKDHLHRHTRTHTGEKPFQCRICMRNF | |
| | SLSQTLKRHLRTHLRGS | |
| 166 | SRPGERPFQCRICMRNFSRNTNLTRHTRTHTGEKPFQCRICMRNFSRREHLVRHL | 1456 |
| | RTHTGGGGSQKPFQCRICMRNFSHKSSLTRHLRTHTGEKPFQCRICMRNFSRPD | |
| | NLPRHLKTHTGSQKPFQCRICMRNFSDARGLLRHTRTHTGEKPFQCRICMRNFSF | |
| | HSYLQKHLRTHLRGS | |
| 167 | SRPGERPFQCRICMRNFSSPSKLARHTRTHTGEKPFQCRICMRNFSQSPSLKRHLR | 1457 |
| | THTGGGGSQKPFQCRICMRNFSKNNDLTRHTRTHTGEKPFQCRICMRNFSRREH | |
| | LVRHLRTHTGSQKPFQCRICMRNFSRREHLTIHLRTHTGEKPFQCRICMRNFSRR | |
| | DNLNRHLKTHLRGS | |
| 168 | SRPGERPFQCRICMRNFSVPSKLLRHTRTHTGEKPFQCRICMRNFSQRSSLVRHL | 1458 |
| | RTHTGGGGSQKPFQCRICMRNFSKNNDLTRHTRTHTGEKPFQCRICMRNFSRRE | |
| | HLVRHLRTHTGSQKPFQCRICMRNFSRREHLTIHLRTHTGEKPFQCRICMRNFSR | |
| | RDNLNRHLKTHLRGS | |
| 169 | SRPGERPFQCRICMRNFSLSQTLKRHLRTHTGEKPFQCRICMRNFSRLDMLARHL | 1459 |
| | KTHTGGGGSQKPFQCRICMRNFSRKRNLIMHTRTHTGEKPFQCRICMRNFSDHS | |
| | SLKRHLRTHTGGGGSQKPFQCRICMRNFSDSSVLRRHLRTHTGEKPFQCRICMR | |
| | NFSQNVGLKIHLKTHLRGS | |
| 170 | SRPGERPFQCRICMRNFSQQTNLTRHLRTHTGEKPFQCRICMRNFSANRTLVHH | 1440 |
| | LKTHTGGGGSQKPFQCRICMRNFSDRGNLTRHLRTHTGEKPFQCRICMRNFSRK | |
| | TGLLIHLKTHTGGGGSQKPFQCRICMRNFSRREVLENHLRTHTGEKPFQCRICMR | |
| | NFSRRDNLNRHLKTHLRGS | |
| 171 | SRPGERPFQCRICMRNFSKGNDLTRHTRTHTGEKPFQCRICMRNFSRREHLVRHL | 1461 |
| | RTHTGGGGSQKPFQCRICMRNFSRREVLENHLRTHTGEKPFQCRICMRNFSQSA | |
| | HLGRHLKTHTGSQKPFQCRICMRNFSSRQALKRHTRTHTGEKPFQCRICMRNFS | |
| | QSGTLVRHLRTHLRGS | |
| 172 | SRPGERPFQCRICMRNFSQSAHLKRHLRTHTGEKPFQCRICMRNFSRRDSLPLHL | 1462 |
| | KTHTGGGGSQKPFQCRICMRNFSRNIHLQTHTRTHTGEKPFQCRICMRNFSRNE | |
| | HLANHLRTHTGSQKPFQCRICMRNFSDPSNLRRHTRTHTGEKPFQCRICMRNFS | |
| | LKEHLTRHLRTHLRGS | |
| 173 | SRPGERPFQCRICMRNFSRPSDLSVHTRTHTGEKPFQCRICMRNFSDHSSLKRHL | 1463 |
| | RTHTGGGGSQKPFQCRICMRNFSTHAHLTRHTRTHTGEKPFQCRICMRNFSRRD | |
| | NLHTHLRTHTGSQKPFQCRICMRNFSTNNNLARHTRTHTGEKPFQCRICMRNFS | |
| | RTDSLTLHLRTHLRGS | |
| 174 | SRPGERPFQCRICMRNFSKGNDLTRHTRTHTGEKPFQCRICMRNFSRREHLVRHL | 1464 |
| | RTHTGGGGSQKPFQCRICMRNFSRREVLENHLRTHTGEKPFQCRICMRNFSQSA | |
| | HLGRHLKTHTGSQKPFQCRICMRNFSQRSDLTRHLRTHTGEKPFQCRICMRNFS | |
| | QGGTLRRHLKTHLRGS | |
| 175 | SRPGERPFQCRICMRNFSQSAHLKRHLRTHTGEKPFQCRICMRNFSRKDSLMVH | 1465 |
| | LKTHTGGGGSQKPFQCRICMRNFSRNIHLQTHTRTHTGEKPFQCRICMRNFSRN | |
| | EHLANHLRTHTGSQKPFQCRICMRNFSDPSNLRRHTRTHTGEKPFQCRICMRNF | |
| | SLKEHLTRHLRTHLRGS | |
| 176 | SRPGERPFQCRICMRNFSRPSDLSVHTRTHTGEKPFQCRICMRNFSDHSSLKRHL | 1466 |
| | RTHTGGGGSQKPFQCRICMRNFSTAAHLTRHTRTHTGEKPFQCRICMRNFSRQ | |
| | DNLHTHLRTHTGSQKPFQCRICMRNFSTNNNLARHTRTHTGEKPFQCRICMRNF | |
| | SRTDSLTLHLRTHLRGS | |
| 177 | SRPGERPFQCRICMRNFSRNHTLTRHTRTHTGEKPFQCRICMRNFSQRSSLVRHL | 1467 |
| | RTHTGGGGSQKPFQCRICMRNFSQSGTLKRHLRTHTGEKPFQCRICMRNFSRND | |
| | KLVPHLKTHTGGGGSQKPFQCRICMRNFSQGGNLTRHLRTHTGEKPFQCRICMR | |
| | NFSERRGLHRHLKTHLRGS | |
| 178 | SRPGERPFQCRICMRNFSSPSKLVRHTRTHTGEKPFQCRICMRNFSLPHHLQRHL | 1468 |
| | RTHTGGGGSQKPFQCRICMRNFSRRDDLTRHLRTHTGEKPFQCRICMRNFSRLD | |
| | MLARHLKTHTGSQKPFQCRICMRNFSQTQNLTRHLRTHTGEKPFQCRICMRNFS | |
| | RTEHLARHLKTHLRGS | |
| 179 | SRPGERPFQCRICMRNFSQSPHLKRHLRTHTGEKPFQCRICMRNFSRTEHLARHL | 1469 |
| | KTHTGSQKPFQCRICMRNFSMTSSLRRHTRTHTGEKPFQCRICMRNFSRQDNLG | |
| | RHLRTHTGSQKPFQCRICMRNFSSDRRDLDHTRTHTGEKPFQCRICMRNFSSFQ | |
| | SYLEHLRTHLRGS | |
| 180 | SRPGERPFQCRICMRNFSKRHTLTRHTRTHTGEKPFQCRICMRNFSQRSSLVRHL | 1470 |
| | RTHTGGGGSQKPFQCRICMRNFSQSGTLKRHLRTHTGEKPFQCRICMRNFSRND | |
| | KLVPHLKTHTGGGGSQKPFQCRICMRNFSQGGNLTRHLRTHTGEKPFQCRICMR | |
| | NFSERRGLHRHLKTHLRGS | |
| 181 | SRPGERPFQCRICMRNFSTNSKLTRHTRTHTGEKPFQCRICMRNFSEAHHLSRHL | 1471 |
| | RTHTGGGGSQKPFQCRICMRNFSRTDTLARHLRTHTGEKPFQCRICMRNFSRLD | |
| | MLARHLKTHTGSQKPFQCRICMRNFSQLSNLTRHTRTHTGEKPFQCRICMRNFS | |
| | RREHLVRHLRTHLRGS | |
| 182 | SRPGERPFQCRICMRNFSQSAHLKRHLRTHTGEKPFQCRICMRNFSRTEHLARHL | 1472 |
| | KTHTGSQKPFQCRICMRNFSHKSSLTRHLRTHTGEKPFQCRICMRNFSRPDNLPR | |
| | HLKTHTGSQKPFQCRICMRNFSDARGLLRHTRTHTGEKPFQCRICMRNFSFHSYL | |
| | QKHLRTHLRGS | |
| 183 | SRPGERPFQCRICMRNFSKRHTLTRHTRTHTGEKPFQCRICMRNFSQRSSLVRHL | 1473 |
| | RTHTGGGGSQKPFQCRICMRNFSQSTTLKRHLRTHTGEKPFQCRICMRNFSRTE | |
| | HLARHLKTHTGGGGSQKPFQCRICMRNFSQGGNLTRHLRTHTGEKPFQCRICM | |
| | RNFSERRGLHRHLKTHLRGS | |
| 184 | SRPGERPFQCRICMRNFSRKQHLTLHTRTHTGEKPFQCRICMRNFSDTSVLNRHL | 1474 |
| | RTHTGSQKPFQCRICMRNFSLRQTLARHTRTHTGEKPFQCRICMRNFSRPESLTI | |
| | HLRTHTGGGGSQKPFQCRICMRNFSDSPTLRRHTRTHTGEKPFQCRICMRNFSD | |
| | HSSLKRHLRTHLRGS | |
| 185 | SRPGERPFQCRICMRNFSRRAHLLSHTRTHTGEKPFQCRICMRNFSEAHHLSRHL | 1475 |
| | RTHTGSQKPFQCRICMRNFSKGNDLTRHTRTHTGEKPFQCRICMRNFSRREHLV | |
| | RHLRTHTGSQKPFQCRICMRNFSRREHLTIHLRTHTGEKPFQCRICMRNFSRQDN | |
| | LQRHLKTHLRGS | |
| 186 | SRPGERPFQCRICMRNFSVRKDLTRHTRTHTGEKPFQCRICMRNFSRQDNLGRH | 1476 |
| | LRTHTGGGGSQKPFQCRICMRNFSDPSVLTRHLRTHTGEKPFQCRICMRNFSQN | |
| | SHLRRHLKTHTGSQKPFQCRICMRNFSKKDHLHRHTRTHTGEKPFQCRICMRNF | |
| | SLSQTLKRHLRTHLRGS | |
| 187 | SRPGERPFQCRICMRNFSRKQHLQLHTRTHTGEKPFQCRICMRNFSDKSVLRRHL | 1477 |
| | RTHTGSQKPFQCRICMRNFSSNLSLKRHTRTHTGEKPFQCRICMRNFSRPEHLLIH | |
| | LRTHTGGGGSQKPFQCRICMRNFSDSPTLRRHTRTHTGEKPFQCRICMRNFSDH | |
| | SSLKRHLRTHLRGS | |
| 188 | SRPGERPFQCRICMRNFSRRAHLLSHTRTHTGEKPFQCRICMRNFSEAHHLSRHL | 1478 |
| | RTHTGSQKPFQCRICMRNFSKNNDLTRHTRTHTGEKPFQCRICMRNFSRREHLV | |
| | RHLRTHTGSQKPFQCRICMRNFSRAEHLAIHLRTHTGEKPFQCRICMRNFSRRDN | |
| | LNRHLKTHLRGS | |
| 189 | SRPGERPFQCRICMRNFSDSPTLRRHTRTHTGEKPFQCRICMRNFSRQDNLGRH | 1479 |
| | LRTHTGGGGSQKPFQCRICMRNFSDGSTLNRHTRTHTGEKPFQCRICMRNFSQS | |
| | AHLKRHLRTHTGSQKPFQCRICMRNFSRREHLVRHLRTHTGEKPFQCRICMRNFS | |
| | VSNSLARHLKTHLRGS | |
| 190 | SRPGERPFQCRICMRNFSKQDHLSVHTRTHTGEKPFQCRICMRNFSQSGHLKAH | 1480 |
| | LRTHTGSQKPFQCRICMRNFSTRSKLDRHTRTHTGEKPFQCRICMRNFSQRSSLV | |
| | RHLRTHTGSQKPFQCRICMRNFSLKKDLLRHTRTHTGEKPFQCRICMRNFSDHSS | |
| | LKRHLRTHLRGS | |
| 191 | SRPGERPFQCRICMRNFSKGNDLTRHTRTHTGEKPFQCRICMRNFSRREHLVRHL | 1481 |
| | RTHTGSQKPFQCRICMRNFSLNKTLVEHTRTHTGEKPFQCRICMRNFSQSGTLKR | |
| | HLRTHTGSQKPFQCRICMRNFSRTRNLVLHTRTHTGEKPFQCRICMRNFSRREHL | |
| | VRHLRTHLRGS | |
| 192 | SRPGERPFQCRICMRNFSVRKDLTRHTRTHTGEKPFQCRICMRNFSRQDNLGRH | 1482 |
| | LRTHTGGGGSQKPFQCRICMRNFSDGSTLNRHTRTHTGEKPFQCRICMRNFSQS | |
| | AHLKRHLRTHTGSQKPFQCRICMRNFSKKDHLHRHTRTHTGEKPFQCRICMRNF | |
| | SLSQTLKRHLRTHLRGS | |
| 193 | SRPGERPFQCRICMRNFSRGSHLQQHTRTHTGEKPFQCRICMRNFSQSGHLKAH | 1483 |
| | LRTHTGSQKPFQCRICMRNFSLKEHLTRHLRTHTGEKPFQCRICMRNFSQTQSLQ | |
| | RHLKTHTGSQKPFQCRICMRNFSDSSVLRRHLRTHTGEKPFQCRICMRNFSEGGA | |
| | LRRHLKTHLRGS | |
| 194 | SRPGERPFQCRICMRNFSKGNDLTRHTRTHTGEKPFQCRICMRNFSRREHLVRHL | 1484 |
| | RTHTGSQKPFQCRICMRNFSLKKTLKEHTRTHTGEKPFQCRICMRNFSQSTTLKR | |
| | HLRTHTGSQKPFQCRICMRNFSRTRNLVLHTRTHTGEKPFQCRICMRNFSRREHL | |
| | VRHLRTHLRGS | |
| 195 | SRPGERPFQCRICMRNFSQSAHLKRHLRTHTGEKPFQCRICMRNFSRTDDLGRHL | 1485 |
| | KTHTGGGGSQKPFQCRICMRNFSKKFNLQAHTRTHTGEKPFQCRICMRNFSDPS | |
| | NLARHLRTHTGGGGSQKPFQCRICMRNFSQGANLSRHLRTHTGEKPFQCRICM | |
| | RNFSRRDNLLRHLKTHLRGS | |
| 196 | SRPGERPFQCRICMRNFSLREPLDRHTRTHTGEKPFQCRICMRNFSDSSVLRRHL | 1486 |
| | RTHTGSQKPFQCRICMRNFSQKENLKSHLRTHTGEKPFQCRICMRNFSMNHHLK | |
| | AHLKTHTGSQKPFQCRICMRNFSQNEHLKVHLRTHTGEKPFQCRICMRNFSVGS | |
| | NLTRHLKTHLRGS | |
| 197 | SRPGERPFQCRICMRNFSKKFNLQAHTRTHTGEKPFQCRICMRNFSDPSNLARHL | 1487 |
| | RTHTGGGGSQKPFQCRICMRNFSQHINLTRHLRTHTGEKPFQCRICMRNFSRRD | |
| | NLLRHLKTHTGSQKPFQCRICMRNFSQSAHLKRHLRTHTGEKPFQCRICMRNFSR | |
| | LDMLARHLKTHLRGS | |
| 198 | SRPGERPFQCRICMRNFSRREHLVRHLRTHTGEKPFQCRICMRNFSDMGNLGRH | 1488 |
| | LKTHTGSQKPFQCRICMRNFSKKDHLHRHTRTHTGEKPFQCRICMRNFSRREVLE | |
| | NHLRTHTGSQKPFQCRICMRNFSQSAHLKRHLRTHTGEKPFQCRICMRNFSLKH | |
| | DLRRHLKTHLRGS | |
| 199 | SRPGERPFQCRICMRNFSQKSNLTTHLRTHTGEKPFQCRICMRNFSRRHGLGRHL | 1489 |
| | KTHTGSQKPFQCRICMRNFSGASALRQHTRTHTGEKPFQCRICMRNFSQQTNLT | |
| | RHLRTHTGGGGSQKPFQCRICMRNFSGHSALRQHTRTHTGEKPFQCRICMRNFS | |
| | QSAHLKRHLRTHLRGS | |
| 200 | SRPGERPFQCRICMRNFSGMLSLAVHTRTHTGEKPFQCRICMRNFSDASNLRRH | 1490 |
| | LRTHTGSQKPFQCRICMRNFSRHEHLITHTRTHTGEKPFQCRICMRNFSRADNLG | |
| | RHLRTHTGGGGSQKPFQCRICMRNFSRGDNLKTHLRTHTGEKPFQCRICMRNFS | |
| | HGHRLKTHLKTHLRGS | |
| 201 | SRPGERPFQCRICMRNFSQQTNLTRHLRTHTGEKPFQCRICMRNFSQKANLGVH | 1491 |
| | LKTHTGSQKPFQCRICMRNFSHESSLRRHLRTHTGEKPFQCRICMRNFSISHNLAR | |
| | HLKTHTGGGGSQKPFQCRICMRNFSKNNDLLKHTRTHTGEKPFQCRICMRNFSD | |
| | ISVLHRHLRTHLRGS | |
| 202 | SRPGERPFQCRICMRNFSSPSKLARHTRTHTGEKPFQCRICMRNFSVKETLTRHLR | 1492 |
| | THTGGGGSQKPFQCRICMRNFSTRDALTKHTRTHTGEKPFQCRICMRNFSRTDT | |
| | LARHLRTHTGSQKPFQCRICMRNFSRPHNLLRHTRTHTGEKPFQCRICMRNFSRR | |
| | EVLENHLRTHLRGS | |
| 203 | SRPGERPFQCRICMRNFSQGSSLRRHLRTHTGEKPFQCRICMRNFSISHNLARHL | 1493 |
| | KTHTGSQKPFQCRICMRNFSDSSVLRRHLRTHTGEKPFQCRICMRNFSENSKLNR | |
| | HLKTHTGSQKPFQCRICMRNFSRQDNLGRHLRTHTGEKPFQCRICMRNFSRSDT | |
| | LPVHLKTHLRGS | |
| 204 | SRPGERPFQCRICMRNFSKGNDLTRHTRTHTGEKPFQCRICMRNFSRREHLVRHL | 1494 |
| | RTHTGSQKPFQCRICMRNFSRREHLTIHLRTHTGEKPFQCRICMRNFSRQDNLQR | |
| | HLKTHTGGGGSQKPFQCRICMRNFSSRQALKRHTRTHTGEKPFQCRICMRNFSQ | |
| | SGTLVRHLRTHLRGS | |
| 205 | SRPGERPFQCRICMRNFSQSAHLKRHLRTHTGEKPFQCRICMRNFSRLDMLARH | 1495 |
| | LKTHTGGGGSQKPFQCRICMRNFSSRFNLSTHTRTHTGEKPFQCRICMRNFSDAS | |
| | NLRRHLRTHTGGGGSQKPFQCRICMRNFSQQTNLTRHLRTHTGEKPFQCRICMR | |
| | NFSRVDNLPRHLKTHLRGS | |
| 206 | SRPGERPFQCRICMRNFSLREPLDRHTRTHTGEKPFQCRICMRNFSDSSVLRRHL | 1496 |
| | RTHTGSQKPFQCRICMRNFSQKCNLQAHLRTHTGEKPFQCRICMRNFSMNHHL | |
| | KAHLKTHTGSQKPFQCRICMRNFSQNEHLTVHLRTHTGEKPFQCRICMRNFSVM | |
| | GNLTRHLKTHLRGS | |
| 207 | SRPGERPFQCRICMRNFSKKCNLLSHTRTHTGEKPFQCRICMRNFSERGNLARHL | 1497 |
| | RTHTGGGGSQKPFQCRICMRNFSQGANLSRHLRTHTGEKPFQCRICMRNFSRR | |
| | DNLLRHLKTHTGSQKPFQCRICMRNFSQSAHLKRHLRTHTGEKPFQCRICMRNFS | |
| | RLDMLARHLKTHLRGS | |
| 208 | SRPGERPFQCRICMRNFSRQEHLVRHLRTHTGEKPFQCRICMRNFSEGGNLMRH | 1498 |
| | LKTHTGSQKPFQCRICMRNFSRREHLVRHLRTHTGEKPFQCRICMRNFSRPDALP | |
| | RHLKTHTGSQKPFQCRICMRNFSQSAHLKRHLRTHTGEKPFQCRICMRNFSVGN | |
| | SLSRHLKTHLRGS | |
| 209 | SRPGERPFQCRICMRNFSAKSGLSAHTRTHTGEKPFQCRICMRNFSEASNLTRHL | 1499 |
| | RTHTGSQKPFQCRICMRNFSRHEHLITHTRTHTGEKPFQCRICMRNFSRADNLGR | |
| | HLRTHTGGGGSQKPFQCRICMRNFSRLDNLKTHLRTHTGEKPFQCRICMRNFSH | |
| | GHRLKTHLKTHLRGS | |
| 210 | SRPGERPFQCRICMRNFSQGGTLRRHLRTHTGEKPFQCRICMRNFSQTAHLQTH | 1500 |
| | LKTHTGSQKPFQCRICMRNFSRADNLVRHLRTHTGEKPFQCRICMRNFSKKVSLQ | |
| | MHLKTHTGGGGSQKPFQCRICMRNFSKQHDLVVHTRTHTGEKPFQCRICMRNF | |
| | SDHSSLKRHLRTHLRGS | |
| 211 | SRPGERPFQCRICMRNFSSPSKLARHTRTHTGEKPFQCRICMRNFSVKETLTRHLR | 1501 |
| | THTGGGGSQKPFQCRICMRNFSTRDALTKHTRTHTGEKPFQCRICMRNFSRTDT | |
| | LARHLRTHTGSQKPFQCRICMRNFSRQDNLGRHLRTHTGEKPFQCRICMRNFSR | |
| | LDVLAMHLKTHLRGS | |
| 212 | SRPGERPFQCRICMRNFSQRSDLTRHLRTHTGEKPFQCRICMRNFSRVDGLGHH | 1502 |
| | LKTHTGSQKPFQCRICMRNFSRQEHLVRHLRTHTGEKPFQCRICMRNFSEGGNL | |
| | MRHLKTHTGSQKPFQCRICMRNFSKKDHLHRHTRTHTGEKPFQCRICMRNFSRR | |
| | EVLENHLRTHLRGS | |
| 213 | SRPGERPFQCRICMRNFSQQQALKRHTRTHTGEKPFQCRICMRNFSVRHNLTRH | 1503 |
| | LRTHTGSQKPFQCRICMRNFSDSSVLRRHLRTHTGEKPFQCRICMRNFSENSKLN | |
| | RHLKTHTGSQKPFQCRICMRNFSRQDNLGRHLRTHTGEKPFQCRICMRNFSRSD | |
| | TLPVHLKTHLRGS | |
| 214 | SRPGERPFQCRICMRNFSKGNDLTRHTRTHTGEKPFQCRICMRNFSRREHLVRHL | 1504 |
| | RTHTGSQKPFQCRICMRNFSRREHLTIHLRTHTGEKPFQCRICMRNFSRRDNLNR | |
| | HLKTHTGGGGSQKPFQCRICMRNFSTKQVLDRHTRTHTGEKPFQCRICMRNFSQ | |
| | STTLKRHLRTHLRGS | |
| 215 | SRPGERPFQCRICMRNFSQRPHLTNHLRTHTGEKPFQCRICMRNFSRNDLLKRHL | 1505 |
| | KTHTGGGGSQKPFQCRICMRNFSKKFNLQAHTRTHTGEKPFQCRICMRNFSDPS | |
| | NLARHLRTHTGGGGSQKPFQCRICMRNFSQGANLSRHLRTHTGEKPFQCRICM | |
| | RNFSRRDNLLRHLKTHLRGS | |
| 216 | SRPGERPFQCRICMRNFSDRSSLKRHLRTHTGEKPFQCRICMRNFSQSNSLNAHL | 1506 |
| | KTHTGSQKPFQCRICMRNFSRVDHLHRHLRTHTGEKPFQCRICMRNFSRSHTLTS | |
| | HLKTHTGSQKPFQCRICMRNFSTPQVLRRHTRTHTGEKPFQCRICMRNFSQGGT | |
| | LNRHLRTHLRGS | |
| 217 | SRPGERPFQCRICMRNFSKKFNLQAHTRTHTGEKPFQCRICMRNFSDPSNLARHL | 1507 |
| | RTHTGGGGSQKPFQCRICMRNFSQQTNLTRHLRTHTGEKPFQCRICMRNFSRV | |
| | DNLPRHLKTHTGSQKPFQCRICMRNFSQSAHLKRHLRTHTGEKPFQCRICMRNF | |
| | SRLDMLARHLKTHLRGS | |
| 218 | SRPGERPFQCRICMRNFSRREHLVRHLRTHTGEKPFQCRICMRNFSDMGNLGRH | 1508 |
| | LKTHTGSQKPFQCRICMRNFSRKHHLGRHTRTHTGEKPFQCRICMRNFSRREVLE | |
| | NHLRTHTGSQKPFQCRICMRNFSQSAHLKRHLRTHTGEKPFQCRICMRNFSLKH | |
| | DLRRHLKTHLRGS | |
| 219 | SRPGERPFQCRICMRNFSAKSGLSAHTRTHTGEKPFQCRICMRNFSEASNLTRHL | 1509 |
| | RTHTGSQKPFQCRICMRNFSRKTHLQHHTRTHTGEKPFQCRICMRNFSREDNLG | |
| | RHLRTHTGGGGSQKPFQCRICMRNFSRDDNLRTHLRTHTGEKPFQCRICMRNFS | |
| | HGHRLKTHLKTHLRGS | |
| 220 | SRPGERPFQCRICMRNFSQGGTLRRHLRTHTGEKPFQCRICMRNFSQTAHLQTH | 1510 |
| | LKTHTGSQKPFQCRICMRNFSRPDNLARHLRTHTGEKPFQCRICMRNFSKRVSLE | |
| | HHLKTHTGGGGSQKPFQCRICMRNFSRPSDLSVHTRTHTGEKPFQCRICMRNFS | |
| | DHSSLKRHLRTHLRGS | |
| 221 | SRPGERPFQCRICMRNFSVPSKLKRHTRTHTGEKPFQCRICMRNFSQRSDLTRHL | 1511 |
| | RTHTGGGGSQKPFQCRICMRNFSTRDALTKHTRTHTGEKPFQCRICMRNFSRTD | |
| | TLARHLRTHTGSQKPFQCRICMRNFSRPHNLLRHTRTHTGEKPFQCRICMRNFSR | |
| | REVLENHLRTHLRGS | |
| 222 | SRPGERPFQCRICMRNFSQRSDLTRHLRTHTGEKPFQCRICMRNFSRRDNLPKHL | 1512 |
| | KTHTGSQKPFQCRICMRNFSRREHLVRHLRTHTGEKPFQCRICMRNFSDPSNLQ | |
| | RHLKTHTGSQKPFQCRICMRNFSKKDHLHRHTRTHTGEKPFQCRICMRNFSRRE | |
| | VLENHLRTHLRGS | |
| 223 | SRPGERPFQCRICMRNFSQQQALKRHTRTHTGEKPFQCRICMRNFSVRHNLTRH | 1513 |
| | LRTHTGSQKPFQCRICMRNFSDSSVLRRHLRTHTGEKPFQCRICMRNFSENSKLN | |
| | RHLKTHTGSQKPFQCRICMRNFSRQDNLGRHLRTHTGEKPFQCRICMRNFSRRD | |
| | SLPLHLKTHLRGS | |
| 224 | SRPGERPFQCRICMRNFSKGNDLTRHTRTHTGEKPFQCRICMRNFSRREHLVRHL | 1514 |
| | RTHTGSQKPFQCRICMRNFSRKEHLVGHLRTHTGEKPFQCRICMRNFSRGDNLN | |
| | RHLKTHTGGGGSQKPFQCRICMRNFSSRQALKRHTRTHTGEKPFQCRICMRNFS | |
| | QSGTLVRHLRTHLRGS | |
| 225 | SRPGERPFQCRICMRNFSQSAHLKRHLRTHTGEKPFQCRICMRNFSRLDMLARH | 1515 |
| | LKTHTGGGGSQKPFQCRICMRNFSKKCNLLSHTRTHTGEKPFQCRICMRNFSER | |
| | GNLARHLRTHTGGGGSQKPFQCRICMRNFSQQTNLTRHLRTHTGEKPFQCRIC | |
| | MRNFSRVDNLPRHLKTHLRGS | |
| 226 | SRPGERPFQCRICMRNFSDHSSLKRHLRTHTGEKPFQCRICMRNFSQSNTLRSHL | 1516 |
| | KTHTGSQKPFQCRICMRNFSRVDHLHRHLRTHTGEKPFQCRICMRNFSRRYILQH | |
| | HLKTHTGSQKPFQCRICMRNFSTPQVLRRHTRTHTGEKPFQCRICMRNFSQGGT | |
| | LNRHLRTHLRGS | |
| 227 | SRPGERPFQCRICMRNFSKKCNLLSHTRTHTGEKPFQCRICMRNFSERGNLARHL | 1517 |
| | RTHTGGGGSQKPFQCRICMRNFSQGANLSRHLRTHTGEKPFQCRICMRNFSRR | |
| | DNLLRHLKTHTGSQKPFQCRICMRNFSQSAHLKRHLRTHTGEKPFQCRICMRNFS | |
| | RTDDLGRHLKTHLRGS | |
| 228 | SRPGERPFQCRICMRNFSRREHLVRHLRTHTGEKPFQCRICMRNFSDMGNLGRH | 1518 |
| | LKTHTGSQKPFQCRICMRNFSKKDHLHRHTRTHTGEKPFQCRICMRNFSRREVLE | |
| | NHLRTHTGSQKPFQCRICMRNFSQSAHLKRHLRTHTGEKPFQCRICMRNFSVGN | |
| | SLSRHLKTHLRGS | |
| 229 | SRPGERPFQCRICMRNFSGGAALAVHTRTHTGEKPFQCRICMRNFSDRSNLTRH | 1519 |
| | LRTHTGSQKPFQCRICMRNFSRHEHLITHTRTHTGEKPFQCRICMRNFSRADNLG | |
| | RHLRTHTGGGGSQKPFQCRICMRNFSRDDNLRTHLRTHTGEKPFQCRICMRNFS | |
| | HGHRLKTHLKTHLRGS | |
| 230 | SRPGERPFQCRICMRNFSQQTNLTRHLRTHTGEKPFQCRICMRNFSQKANLGVH | 1520 |
| | LKTHTGSQKPFQCRICMRNFSTNSSLTRHLRTHTGEKPFQCRICMRNFSVVSNLR | |
| | RHLKTHTGGGGSQKPFQCRICMRNFSKNNDLLKHTRTHTGEKPFQCRICMRNFS | |
| | DHSSLKRHLRTHLRGS | |
| 231 | SRPGERPFQCRICMRNFSSPSKLARHTRTHTGEKPFQCRICMRNFSVKETLTRHLR | 1521 |
| | THTGGGGSQKPFQCRICMRNFSTRDALTKHTRTHTGEKPFQCRICMRNFSRTDT | |
| | LARHLRTHTGSQKPFQCRICMRNFSRQANLVRHTRTHTGEKPFQCRICMRNFSRI | |
| | EILRNHLRTHLRGS | |
| 232 | SRPGERPFQCRICMRNFSQRSDLTRHLRTHTGEKPFQCRICMRNFSRRDNLPKHL | 1522 |
| | KTHTGSQKPFQCRICMRNFSRREHLVRHLRTHTGEKPFQCRICMRNFSDPSNLQ | |
| | RHLKTHTGSQKPFQCRICMRNFSRREHLVRHLRTHTGEKPFQCRICMRNFSRPD | |
| | ALPRHLKTHLRGS | |
| 233 | SRPGERPFQCRICMRNFSQQQALTRHTRTHTGEKPFQCRICMRNFSLGHNLRRH | 1523 |
| | LRTHTGSQKPFQCRICMRNFSDSSVLRRHLRTHTGEKPFQCRICMRNFSENSKLN | |
| | RHLKTHTGSQKPFQCRICMRNFSRQDNLGRHLRTHTGEKPFQCRICMRNFSRSD | |
| | TLPVHLKTHLRGS | |
| 234 | SRPGERPFQCRICMRNFSKGNDLTRHTRTHTGEKPFQCRICMRNFSRREHLVRHL | 1524 |
| | RTHTGSQKPFQCRICMRNFSRKEHLVGHLRTHTGEKPFQCRICMRNFSRGDNLN | |
| | RHLKTHTGGGGSQKPFQCRICMRNFSQRSDLTRHLRTHTGEKPFQCRICMRNFS | |
| | QGGTLRRHLKTHLRGS | |
| 235 | SRPGERPFQCRICMRNFSQQTNLTRHLRTHTGEKPFQCRICMRNFSANRTLVHH | 1525 |
| | LKTHTGGGGSQKPFQCRICMRNFSDRGNLTRHLRTHTGEKPFQCRICMRNFSRK | |
| | TGLLIHLKTHTGGGGSQKPFQCRICMRNFSRRHILDRHTRTHTGEKPFQCRICMR | |
| | NFSRQDNLGRHLRTHLRGS | |
| 236 | SRPGERPFQCRICMRNFSDHSSLKRHLRTHTGEKPFQCRICMRNFSQSNTLRSHL | 1526 |
| | KTHTGSQKPFQCRICMRNFSRVDHLHRHLRTHTGEKPFQCRICMRNFSRRYSLN | |
| | NHLKTHTGSQKPFQCRICMRNFSTPQVLRRHTRTHTGEKPFQCRICMRNFSQGG | |
| | TLNRHLRTHLRGS | |
| 237 | SRPGERPFQCRICMRNFSKKFNLQAHTRTHTGEKPFQCRICMRNFSDPSNLARHL | 1527 |
| | RTHTGGGGSQKPFQCRICMRNFSQHINLTRHLRTHTGEKPFQCRICMRNFSRRD | |
| | NLLRHLKTHTGSQKPFQCRICMRNFSQSAHLKRHLRTHTGEKPFQCRICMRNFSR | |
| | TDDLGRHLKTHLRGS | |
| 238 | SRPGERPFQCRICMRNFSRVDHLHRHLRTHTGEKPFQCRICMRNFSQAATLQRH | 1528 |
| | LKTHTGSQKPFQCRICMRNFSRKHHLGRHTRTHTGEKPFQCRICMRNFSRREVLE | |
| | NHLRTHTGSQKPFQCRICMRNFSQSAHLKRHLRTHTGEKPFQCRICMRNFSVGN | |
| | SLSRHLKTHLRGS | |
| 239 | SRPGERPFQCRICMRNFSGGAALAVHTRTHTGEKPFQCRICMRNFSDRSNLTRH | 1529 |
| | LRTHTGSQKPFQCRICMRNFSRSAHLLNHTRTHTGEKPFQCRICMRNFSRQDNL | |
| | GRHLRTHTGGGGSQKPFQCRICMRNFSRLDNLKTHLRTHTGEKPFQCRICMRNF | |
| | SHGHRLKTHLKTHLRGS | |
| 240 | SRPGERPFQCRICMRNFSQQTNLTRHLRTHTGEKPFQCRICMRNFSQKANLGVH | 1530 |
| | LKTHTGSQKPFQCRICMRNFSTNSSLTRHLRTHTGEKPFQCRICMRNFSVVSNLR | |
| | RHLKTHTGGGGSQKPFQCRICMRNFSKNNDLLKHTRTHTGEKPFQCRICMRNFS | |
| | DISVLHRHLRTHLRGS | |
| 241 | SRPGERPFQCRICMRNFSAPSKLLRHTRTHTGEKPFQCRICMRNFSLRDSLKRHLR | 1531 |
| | THTGGGGSQKPFQCRICMRNFSARDTLTKHTRTHTGEKPFQCRICMRNFSRTDT | |
| | LARHLRTHTGSQKPFQCRICMRNFSRQDNLGRHLRTHTGEKPFQCRICMRNFSR | |
| | LDVLAMHLKTHLRGS | |
| 242 | SRPGERPFQCRICMRNFSQRSDLTRHLRTHTGEKPFQCRICMRNFSRRDNLPKHL | 1532 |
| | KTHTGSQKPFQCRICMRNFSRQEHLVRHLRTHTGEKPFQCRICMRNFSEGGNLM | |
| | RHLKTHTGSQKPFQCRICMRNFSRREHLVRHLRTHTGEKPFQCRICMRNFSRPD | |
| | ALPRHLKTHLRGS | |
| 243 | SRPGERPFQCRICMRNFSRSNNLRLHTRTHTGEKPFQCRICMRNFSDSSVLRRHL | 1533 |
| | RTHTGSQKPFQCRICMRNFSVPSKLKRHTRTHTGEKPFQCRICMRNFSRDDTLVR | |
| | HLRTHTGGGGSQKPFQCRICMRNFSHKHVLDCHTRTHTGEKPFQCRICMRNFS | |
| | QKPNLSRHLRTHLRGS | |
| 244 | SRPGERPFQCRICMRNFSKGNDLTRHTRTHTGEKPFQCRICMRNFSRREHLVRHL | 1534 |
| | RTHTGGGGSQKPFQCRICMRNFSRNFILQRHTRTHTGEKPFQCRICMRNFSQSA | |
| | HLKRHLRTHTGSQKPFQCRICMRNFSSRQALKRHTRTHTGEKPFQCRICMRNFS | |
| | QSGTLVRHLRTHLRGS | |
| 245 | SRPGERPFQCRICMRNFSQQTNLTRHLRTHTGEKPFQCRICMRNFSANRTLVHH | 1535 |
| | LKTHTGGGGSQKPFQCRICMRNFSDGSNLRRHLRTHTGEKPFQCRICMRNFSRI | |
| | DNLDGHLKTHTGGGGSQKPFQCRICMRNFSRRAVLDRHTRTHTGEKPFQCRIC | |
| | MRNFSRQDNLGRHLRTHLRGS | |
| 246 | SRPGERPFQCRICMRNFSDHSSLKRHLRTHTGEKPFQCRICMRNFSQSNTLRSHL | 1536 |
| | KTHTGSQKPFQCRICMRNFSRVDHLHRHLRTHTGEKPFQCRICMRNFSRRYILQH | |
| | HLKTHTGSQKPFQCRICMRNFSTNLTLVRHTRTHTGEKPFQCRICMRNFSQGGTL | |
| | NRHLRTHLRGS | |
| 247 | SRPGERPFQCRICMRNFSKKCNLLSHTRTHTGEKPFQCRICMRNFSERGNLARHL | 1537 |
| | RTHTGGGGSQKPFQCRICMRNFSQHINLTRHLRTHTGEKPFQCRICMRNFSRRD | |
| | NLLRHLKTHTGSQKPFQCRICMRNFSQSAHLKRHLRTHTGEKPFQCRICMRNFSR | |
| | TDDLGRHLKTHLRGS | |
| 248 | SRPGERPFQCRICMRNFSQKENLQVHLRTHTGEKPFQCRICMRNFSRRWGLGR | 1538 |
| | HLKTHTGSQKPFQCRICMRNFSGASALRQHTRTHTGEKPFQCRICMRNFSQQTN | |
| | LTRHLRTHTGGGGSQKPFQCRICMRNFSGRTALRNHTRTHTGEKPFQCRICMRN | |
| | FSQSAHLKRHLRTHLRGS | |
| 249 | SRPGERPFQCRICMRNFSGGAALAVHTRTHTGEKPFQCRICMRNFSDRSNLTRH | 1539 |
| | LRTHTGSQKPFQCRICMRNFSRKTHLQHHTRTHTGEKPFQCRICMRNFSREDNL | |
| | GRHLRTHTGGGGSQKPFQCRICMRNFSRDDNLRTHLRTHTGEKPFQCRICMRN | |
| | FSHGHRLKTHLKTHLRGS | |
| 250 | SRPGERPFQCRICMRNFSQQTNLTRHLRTHTGEKPFQCRICMRNFSQKANLGVH | 1540 |
| | LKTHTGSQKPFQCRICMRNFSHESSLRRHLRTHTGEKPFQCRICMRNFSISHNLAR | |
| | HLKTHTGGGGSQKPFQCRICMRNFSKNNDLLKHTRTHTGEKPFQCRICMRNFSD | |
| | HSSLKRHLRTHLRGS | |
| 251 | SRPGERPFQCRICMRNFSVPSKLKRHTRTHTGEKPFQCRICMRNFSQRSDLTRHL | 1541 |
| | RTHTGGGGSQKPFQCRICMRNFSTRDALTKHTRTHTGEKPFQCRICMRNFSRTD | |
| | TLARHLRTHTGSQKPFQCRICMRNFSRQDNLGRHLRTHTGEKPFQCRICMRNFS | |
| | RLDVLAMHLKTHLRGS | |
| 252 | SRPGERPFQCRICMRNFSQRSDLTRHLRTHTGEKPFQCRICMRNFSRRDGLNGH | 1542 |
| | LKTHTGSQKPFQCRICMRNFSRQEHLVRHLRTHTGEKPFQCRICMRNFSEGGNL | |
| | MRHLKTHTGSQKPFQCRICMRNFSRREHLVRHLRTHTGEKPFQCRICMRNFSRP | |
| | DALPRHLKTHLRGS | |
| 253 | SRPGERPFQCRICMRNFSRSNNLRLHTRTHTGEKPFQCRICMRNFSDSSVLRRHL | 1543 |
| | RTHTGSQKPFQCRICMRNFSLKGHLTRHLRTHTGEKPFQCRICMRNFSRLDMLA | |
| | RHLKTHTGGGGSQKPFQCRICMRNFSYKHVLHSHTRTHTGEKPFQCRICMRNFS | |
| | QTANLMRHLRTHLRGS | |
| 254 | SRPGERPFQCRICMRNFSQQTNLTRHLRTHTGEKPFQCRICMRNFSANRTLVHH | 1544 |
| | LKTHTGGGGSQKPFQCRICMRNFSDRGNLTRHLRTHTGEKPFQCRICMRNFSRK | |
| | TGLLIHLKTHTGGGGSQKPFQCRICMRNFSRRAVLDRHTRTHTGEKPFQCRICMR | |
| | NFSRQDNLGRHLRTHLRGS | |
| 255 | SRPGERPFQCRICMRNFSDHSSLKRHLRTHTGEKPFQCRICMRNFSQSNTLSDHL | 1545 |
| | KTHTGSQKPFQCRICMRNFSRVDHLHRHLRTHTGEKPFQCRICMRNFSRSHTLTS | |
| | HLKTHTGSQKPFQCRICMRNFSAKLSLTRHTRTHTGEKPFQCRICMRNFSQSTTL | |
| | KRHLRTHLRGS | |
| 256 | SRPGERPFQCRICMRNFSKKCNLLSHTRTHTGEKPFQCRICMRNFSERGNLARHL | 1546 |
| | RTHTGGGGSQKPFQCRICMRNFSQQTNLTRHLRTHTGEKPFQCRICMRNFSRV | |
| | DNLPRHLKTHTGSQKPFQCRICMRNFSQSAHLKRHLRTHTGEKPFQCRICMRNF | |
| | SRTDDLGRHLKTHLRGS | |
| 257 | SRPGERPFQCRICMRNFSQKSNLTTHLRTHTGEKPFQCRICMRNFSRRHGLGRHL | 1547 |
| | KTHTGSQKPFQCRICMRNFSGASALRQHTRTHTGEKPFQCRICMRNFSQQTNLT | |
| | RHLRTHTGGGGSQKPFQCRICMRNFSGRTALRNHTRTHTGEKPFQCRICMRNFS | |
| | QSAHLKRHLRTHLRGS | |
| 258 | SRPGERPFQCRICMRNFSGMLSLAVHTRTHTGEKPFQCRICMRNFSDASNLRRH | 1548 |
| | LRTHTGSQKPFQCRICMRNFSRKTHLQHHTRTHTGEKPFQCRICMRNFSREDNL | |
| | GRHLRTHTGGGGSQKPFQCRICMRNFSRDDNLRTHLRTHTGEKPFQCRICMRN | |
| | FSHGHRLKTHLKTHLRGS | |
| 259 | SRPGERPFQCRICMRNFSQKVNLARHLRTHTGEKPFQCRICMRNFSQQGNLQLH | 1549 |
| | LKTHTGSQKPFQCRICMRNFSTNSSLTRHLRTHTGEKPFQCRICMRNFSISHNLAR | |
| | HLKTHTGGGGSQKPFQCRICMRNFSKNNDLLKHTRTHTGEKPFQCRICMRNFSD | |
| | HSSLKRHLRTHLRGS | |
| 260 | SRPGERPFQCRICMRNFSAPSKLLRHTRTHTGEKPFQCRICMRNFSLRDSLKRHLR | 1550 |
| | THTGGGGSQKPFQCRICMRNFSKNNDLLKHTRTHTGEKPFQCRICMRNFSRTDT | |
| | LARHLRTHTGSQKPFQCRICMRNFSRQANLVRHTRTHTGEKPFQCRICMRNFSRI | |
| | EILRNHLRTHLRGS | |
| 261 | SRPGERPFQCRICMRNFSQRSDLTRHLRTHTGEKPFQCRICMRNFSRVDGLGHH | 1551 |
| | LKTHTGSQKPFQCRICMRNFSRREHLVRHLRTHTGEKPFQCRICMRNFSDPSNLQ | |
| | RHLKTHTGSQKPFQCRICMRNFSRREHLVRHLRTHTGEKPFQCRICMRNFSRPD | |
| | ALPRHLKTHLRGS | |
| 262 | SRPGERPFQCRICMRNFSRSNNLRLHTRTHTGEKPFQCRICMRNFSDSSVLRRHL | 1552 |
| | RTHTGSQKPFQCRICMRNFSAPSKLMRHTRTHTGEKPFQCRICMRNFSRMDTL | |
| | GRHLRTHTGGGGSQKPFQCRICMRNFSYKHVLVNHTRTHTGEKPFQCRICMRN | |
| | FSQMSNLDRHLRTHLRGS | |
| 263 | SRPGERPFQCRICMRNFSLREPLDRHTRTHTGEKPFQCRICMRNFSDSSVLRRHL | 1553 |
| | RTHTGSQKPFQCRICMRNFSQKCNLQAHLRTHTGEKPFQCRICMRNFSMNHHL | |
| | KAHLKTHTGSQKPFQCRICMRNFSQREHLNVHLRTHTGEKPFQCRICMRNFSVG | |
| | SNLTRHLKTHLRGS | |
| 264 | SRPGERPFQCRICMRNFSDRSSLKRHLRTHTGEKPFQCRICMRNFSQSNSLNAHL | 1554 |
| | KTHTGSQKPFQCRICMRNFSRVDHLHRHLRTHTGEKPFQCRICMRNFSRSHTLTS | |
| | HLKTHTGSQKPFQCRICMRNFSTNLTLVRHTRTHTGEKPFQCRICMRNFSQGGTL | |
| | NRHLRTHLRGS | |
| 265 | SRPGERPFQCRICMRNFSKKFNLQAHTRTHTGEKPFQCRICMRNFSDNSNLARH | 1555 |
| | LRTHTGGGGSQKPFQCRICMRNFSQQTNLTRHLRTHTGEKPFQCRICMRNFSRV | |
| | DNLPRHLKTHTGSQKPFQCRICMRNFSQSAHLKRHLRTHTGEKPFQCRICMRNF | |
| | SREDSLPRHLKTHLRGS | |
| 266 | SRPGERPFQCRICMRNFSQKENLQVHLRTHTGEKPFQCRICMRNFSRRWGLGR | 1556 |
| | HLKTHTGSQKPFQCRICMRNFSGASALRQHTRTHTGEKPFQCRICMRNFSQQTN | |
| | LTRHLRTHTGGGGSQKPFQCRICMRNFSGGTALRMHTRTHTGEKPFQCRICMR | |
| | NFSQSAHLKRHLRTHLRGS | |
| 267 | SRPGERPFQCRICMRNFSAKSGLSAHTRTHTGEKPFQCRICMRNFSEASNLTRHL | 1557 |
| | RTHTGSQKPFQCRICMRNFSRHEHLITHTRTHTGEKPFQCRICMRNFSRADNLGR | |
| | HLRTHTGGGGSQKPFQCRICMRNFSRDDNLRTHLRTHTGEKPFQCRICMRNFSH | |
| | GHRLKTHLKTHLRGS | |
| 268 | SRPGERPFQCRICMRNFSQNANLARHLRTHTGEKPFQCRICMRNFSQKANLGVH | 1558 |
| | LKTHTGSQKPFQCRICMRNFSTNSSLTRHLRTHTGEKPFQCRICMRNFSISHNLAR | |
| | HLKTHTGGGGSQKPFQCRICMRNFSKNNDLLKHTRTHTGEKPFQCRICMRNFSD | |
| | HSSLKRHLRTHLRGS | |
| 269 | SRPGERPFQCRICMRNFSVPSKLKRHTRTHTGEKPFQCRICMRNFSQRSDLTRHL | 1559 |
| | RTHTGGGGSQKPFQCRICMRNFSKNNDLLKHTRTHTGEKPFQCRICMRNFSRTD | |
| | TLARHLRTHTGSQKPFQCRICMRNFSRPHNLLRHTRTHTGEKPFQCRICMRNFSR | |
| | REVLENHLRTHLRGS | |
| 270 | SRPGERPFQCRICMRNFSQRSDLTRHLRTHTGEKPFQCRICMRNFSRRDGLNGH | 1560 |
| | LKTHTGSQKPFQCRICMRNFSRREHLVRHLRTHTGEKPFQCRICMRNFSDPSNLQ | |
| | RHLKTHTGSQKPFQCRICMRNFSRREHLVRHLRTHTGEKPFQCRICMRNFSRPD | |
| | ALPRHLKTHLRGS | |
| 271 | SRPGERPFQCRICMRNFSRSNNLRLHTRTHTGEKPFQCRICMRNFSDSSVLRRHL | 1561 |
| | RTHTGSQKPFQCRICMRNFSLKGHLTRHLRTHTGEKPFQCRICMRNFSRLDMLA | |
| | RHLKTHTGGGGSQKPFQCRICMRNFSYKHVLVNHTRTHTGEKPFQCRICMRNFS | |
| | QMSNLDRHLRTHLRGS | |

### Example 7: Full Specificity Screen of Constructs in Primary Human T Cells

[0289] The specificity of CRISPR-off and ZF-off constructs for silencing B2M is tested in primary human T cells. The readouts to assess specificity are RNAseq, methylation array and whole genome bisulfite sequencing assays. Genome-wide expression and methylation changes after epigenetic editing compared to negative controls will be profiled.

### Example 8: CpG Methylation Patterns

[0290] The CpG methylation patterns in primary human T cells treated with CRISPR-off or ZF-off are investigated. Hybrid capture assay is performed on bisulfite treated DNA to investigate methylation patterns at CpG sites that are induced by CRISPR-off or ZF-off at the 1 kb region around the B2M TSS.

### Example 9: Screen Follow-Up and Hit Validation

[0291] Top hits from gRNA and ZF-off screens are re-confirmed by repeating screening experimental conditions as well as adjusting doses of CRISPR-off mRNA+sgRNA or ZF-off mRNA as appropriate upward and downward by several half logs to establish dose-response profiles. gRNAs and ZF-off mRNAs demonstrating the best potency and long-term durability profiles are selected for downstream candidate development.

### Example 10: Allogeneic Functional Assays in Primary T Cells

[0292] The response of allogeneic healthy donor CD8⁺ T cells to mock-modified or B2M-silenced T cells are assessed via a mixed lymphocyte co-culture assay and/or a cytotoxicity assay.

[0293] Allogeneic healthy donor CD8⁺ T cell proliferation and/or activation, as measured by flow cytometry for cell dye dilution and cell surface expression of activation markers, respectively, are assessed after co-culture with T cells that are mock-modified or B2M-silenced. A reduction of the response to B2M-silenced cells, demonstrating less allogeneic healthy donor CD8⁺ T cell proliferation and activation, is expected relative to the response to mock-modified cells. Additionally, death of modified T cells after co-incubation with allogeneic healthy donor CD8⁺ T cells is assessed by flow cytometry staining with viability dye or cell viability imaging analysis. B2M-silenced T cells are expected to preferentially survive, relative to mock-modified T cells, in the presence of healthy donor CD8⁺ T cells.

### Example 11: Guide RNA Screening in Primary T Cells with CRISPR-Off Construct

[0294] A B2M single guide re-screen was performed in primary T cells using 172 guide RNAs (shown in Table 9 below) and mRNA encoding fusion protein construct 15. An annotation of the amino acid sequence of fusion protein configuration 15 is shown below. Results are shown in Table 9 below.

[0295] 10 guides showed greater than 20% silencing and 18 guides showed greater than 10% silencing. RNA988 provided 40% silencing.

Annotation of Fusion Protein Configuration
15 Amino Acid Sequence

| Name | Type | Minimum | Maximum | Length |
|---|---|---|---|---|
| SV40 NLS | CDS | 2 | 8 | 7 |
| SV40 NLS | CDS | 9 | 15 | 7 |
| DNMT3A | CDS | 17 | 317 | 301 |
| Linker | CDS | 318 | 344 | 27 |
| DNMT3L full- | CDS | 345 | 730 | 386 |
| length | | | | |
| XTEN80 | CDS | 731 | 810 | 80 |
| dCas9 | CDS | 811 | 2180 | 1370 |
| NLS | CDS | 2181 | 2187 | 7 |
| XTEN16 | CDS | 2188 | 2208 | 21 |
| ZIM3 | CDS | 2211 | 2310 | 100 |
| FLAG | CDS | 2313 | 2320 | 8 |
| SV40 NLS | CDS | 2322 | 2328 | 7 |
| SV40 NLS | CDS | 2329 | 2335 | 7 |

TABLE 9
Normalized percent B2M+ cells in primary T cell populations treated with CRISPR-
off epigenetic repressor using different gRNAs targeting B2M in Primary Human T
Cells, measured at day 6 after administration. Data from two replicates (“plate
1” and “plate 2”) is shown, along with a weighted average of both replicates.
The respective gRNA start position on chromosome 15 (GRCh38) is also provided.

| | | | | | | Weighted | SEQ |
|---|---|---|---|---|---|---|---|
| | | | Sample | Plate 1 | Plate 2 | % B2M + | ID |
| TAR | Sequence | Start | ID | % B2M+ | % B2M+ | Average | NO: |
| TAR264 | GGCCACGGAGCGAGACATCTGTTTAAGAGCTAAGC | 44711541 | WTcas9 | 2.705 | | 2.705 | 1562 |
| | TGGAAACAGCATAGCAAGTTTAAATAAGGCTAGTC | | RNA104 | | | | |
| | CGTTATCAACTTGAAAAAGTGGCACCGAGTCGGTG | | | | | | |
| | CTTTTTT | | | | | | |
| TAR620 | AGAGGAAGGACCAGAGCGGGGTTTAAGAGCTAAGC | 44711628 | RNA1010- | 97.6 | 97.3 | 97.44767 | 1563 |
| | TGGAAACAGCATAGCAAGTTTAAATAAGGCTAGTC | | 001 | | | | |
| | CGTTATCAACTTGAAAAAGTGGCACCGAGTCGGTG | | | | | | |
| | CTTTTTT | | | | | | |
| TAR588 | CATCGGCGCCCTCCGATCTGGTTTAAGAGCTAAGC | 44711290 | RNA111- | 98.6 | 98.3 | 98.45076 | 1564 |
| | TGGAAACAGCATAGCAAGTTTAAATAAGGCTAGTC | | 002 | | | | |
| | CGTTATCAACTTGAAAAAGTGGCACCGAGTCGGTG | | | | | | |
| | CTTTTTT | | | | | | |
| TAR682 | CTCCCGTCGCCGTAGGCCAAGTTTAAGAGCTAAGC | 44711849 | RNA939- | 99.8 | 99.8 | 99.8 | 1565 |
| | TGGAAACAGCATAGCAAGTTTAAATAAGGCTAGTC | | 001 | | | | |
| | CGTTATCAACTTGAAAAAGTGGCACCGAGTCGGTG | | | | | | |
| | CTTTTTT | | | | | | |
| TAR604 | GAGACAGGTGACGGTCCCTGGTTTAAGAGCTAAGC | 44711433 | RNA959- | 99.8 | 99.8 | 99.8 | 1566 |
| | TGGAAACAGCATAGCAAGTTTAAATAAGGCTAGTC | | 001 | | | | |
| | CGTTATCAACTTGAAAAAGTGGCACCGAGTCGGTG | | | | | | |
| | CTTTTTT | | | | | | |
| TAR676 | TCCCCTGCTCCCCGCCGAAAGTTTAAGAGCTAAGC | 44711824 | RNA1001- | 99.9 | 99.9 | 99.9 | 1567 |
| | TGGAAACAGCATAGCAAGTTTAAATAAGGCTAGTC | | 001 | | | | |
| | CGTTATCAACTTGAAAAAGTGGCACCGAGTCGGTG | | | | | | |
| | CTTTTTT | | | | | | |
| TAR259 | GGGCCTTGTCCTGATTGGCTGTTTAAGAGCTAAGC | 44711454 | RNA1009- | 99.4 | 99.5 | 99.45068 | 1568 |
| | TGGAAACAGCATAGCAAGTTTAAATAAGGCTAGTC | | 001 | | | | |
| | CGTTATCAACTTGAAAAAGTGGCACCGAGTCGGTG | | | | | | |
| | CTTTTTT | | | | | | |
| TAR569 | GGGGCCAGTCTGCAAAGCGAGTTTAAGAGCTAAGC | 44711198 | RNA981- | 96.1 | 98.1 | 97.11357 | 1569 |
| | TGGAAACAGCATAGCAAGTTTAAATAAGGCTAGTC | | 001 | | | | |
| | CGTTATCAACTTGAAAAAGTGGCACCGAGTCGGTG | | | | | | |
| | CTTTTTT | | | | | | |
| TAR592 | AAGAAGGCATGCACTAGACTGTTTAAGAGCTAAGC | 44711330 | RNA1000- | 97.1 | 97.2 | 97.15008 | 1570 |
| | TGGAAACAGCATAGCAAGTTTAAATAAGGCTAGTC | | 001 | | | | |
| | CGTTATCAACTTGAAAAAGTGGCACCGAGTCGGTG | | | | | | |
| | CTTTTTT | | | | | | |
| TAR265 | GAGTAGCGCGAGCACAGCTAGTTTAAGAGCTAAGC | 44711562 | RNA105- | 87.8 | 94.5 | 91.18967 | 1571 |
| | TGGAAACAGCATAGCAAGTTTAAATAAGGCTAGTC | | 002 | | | | |
| | CGTTATCAACTTGAAAAAGTGGCACCGAGTCGGTG | | | | | | |
| | CTTTTTT | | | | | | |
| TAR730 | GGAGGGGCGCTTGGGGTCTGGTTTAAGAGCTAAGC | 44712034 | RNA972- | 99.6 | 99.5 | 99.54987 | 1572 |
| | TGGAAACAGCATAGCAAGTTTAAATAAGGCTAGTC | | 001 | | | | |
| | CGTTATCAACTTGAAAAAGTGGCACCGAGTCGGTG | | | | | | |
| | CTTTTTT | | | | | | |
| TAR748 | CACATAGACCCAGAGGTGCTGTTTAAGAGCTAAGC | 44712152 | RNA962- | 99.7 | 99.8 | 99.7501 | 1573 |
| | TGGAAACAGCATAGCAAGTTTAAATAAGGCTAGTC | | 001 | | | | |
| | CGTTATCAACTTGAAAAAGTGGCACCGAGTCGGTG | | | | | | |
| | CTTTTTT | | | | | | |
| TAR551 | CAGCTTGGGAATTCCCTGCAGTTTAAGAGCTAAGC | 44711035 | RNA937- | 99.9 | 99.6 | 99.7506 | 1574 |
| | TGGAAACAGCATAGCAAGTTTAAATAAGGCTAGTC | | 001 | | | | |
| | CGTTATCAACTTGAAAAAGTGGCACCGAGTCGGTG | | | | | | |
| | CTTTTTT | | | | | | |
| TAR572 | TGCCCCCTCGCTTTGCAGACGTTTAAGAGCTAAGC | 44711202 | RNA987- | 99.6 | 99.6 | 99.6 | 1575 |
| | TGGAAACAGCATAGCAAGTTTAAATAAGGCTAGTC | | 001 | | | | |
| | CGTTATCAACTTGAAAAAGTGGCACCGAGTCGGTG | | | | | | |
| | CTTTTTT | | | | | | |
| TAR718 | GTCCCAAAGGCGCGGCGCTGGTTTAAGAGCTAAGC | 44711998 | RNA997- | 99.6 | 99.7 | 99.65057 | 1576 |
| | TGGAAACAGCATAGCAAGTTTAAATAAGGCTAGTC | | 001 | | | | |
| | CGTTATCAACTTGAAAAAGTGGCACCGAGTCGGTG | | | | | | |
| | CTTTTTT | | | | | | |
| TAR686 | CCCGACCCTCCCGTCGCCGTGTTTAAGAGCTAAGC | 44711856 | RNA960- | 99.7 | 99.6 | 99.65 | 1577 |
| | TGGAAACAGCATAGCAAGTTTAAATAAGGCTAGTC | | 001 | | | | |
| | CGTTATCAACTTGAAAAAGTGGCACCGAGTCGGTG | | | | | | |
| | CTTTTTT | | | | | | |
| TAR651 | AGGGCTGGATCTCGGGGAAGGTTTAAGAGCTAAGC | 44711746 | RNA986- | 99.4 | 99.6 | 99.50326 | 1578 |
| | TGGAAACAGCATAGCAAGTTTAAATAAGGCTAGTC | | 001 | | | | |
| | CGTTATCAACTTGAAAAAGTGGCACCGAGTCGGTG | | | | | | |
| | CTTTTTT | | | | | | |
| TAR593 | TAAGAAGGCATGCACTAGACGTTTAAGAGCTAAGC | 44711331 | RNA932- | 99.5 | 98.5 | 99.0032 | 1579 |
| | TGGAAACAGCATAGCAAGTTTAAATAAGGCTAGTC | | 001 | | | | |
| | CGTTATCAACTTGAAAAAGTGGCACCGAGTCGGTG | | | | | | |
| | CTTTTTT | | | | | | |
| TAR564 | GATGCTAAGTGACTTGCTAAGTTTAAGAGCTAAGC | 44711172 | RNA989- | 99.6 | 99.9 | 99.75301 | 1580 |
| | TGGAAACAGCATAGCAAGTTTAAATAAGGCTAGTG | | 001 | | | | |
| | CGTTATCAACTTGAAAAAGTGGCACCGAGTCGGTG | | | | | | |
| | CTTTTTT | | | | | | |
| TAR568 | TGGGGCCAGTCTGCAAAGCGGTTTAAGAGCTAAGC | 44711197 | RNA977- | 96.6 | 97 | 96.79885 | 1581 |
| | TGGAAACAGCATAGCAAGTTTAAATAAGGCTAGTC | | 001 | | | | |
| | CGTTATCAACTTGAAAAAGTGGCACCGAGTCGGTG | | | | | | |
| | CTTTTTT | | | | | | |
| TAR696 | AGAGCGCCGAGGTTGGGGGAGTTTAAGAGCTAAGC | 44711906 | RNA955- | 98.9 | 99.4 | 99.15057 | 1582 |
| | TGGAAACAGCATAGCAAGTTTAAATAAGGCTAGTC | | 001 | | | | |
| | CGTTATCAACTTGAAAAAGTGGCACCGAGTCGGTG | | | | | | |
| | CTTTTTT | | | | | | |
| TAR567 | CAAGTCACTTAGCATCTCTGGTTTAAGAGCTAAGC | 44711179 | RNA985- | 96.8 | 98 | 97.41017 | 1583 |
| | TGGAAACAGCATAGCAAGTTTAAATAAGGCTAGTC | | 001 | | | | |
| | CGTTATCAACTTGAAAAAGTGGCACCGAGTCGGTG | | | | | | |
| | CTTTTTT | | | | | | |
| TAR642 | CCCGCCGTGGGGCTAGTCCAGTTTAAGAGCTAAGC | 44711727 | RNA961- | 99.6 | 99.9 | 99.75082 | 1584 |
| | TGGAAACAGCATAGCAAGTTTAAATAAGGCTAGTC | | 001 | | | | |
| | CGTTATCAACTTGAAAAAGTGGCACCGAGTCGGTG | | | | | | |
| | CTTTTTT | | | | | | |
| TAR584 | TGGGGTGCGCGCCCCAGCTTGTTTAAGAGCTAAGC | 44711272 | RNA947- | 99.8 | 99.7 | 99.74979 | 1585 |
| | TGGAAACAGCATAGCAAGTTTAAATAAGGCTAGTC | | 001 | | | | |
| | CGTTATCAACTTGAAAAAGTGGCACCGAGTCGGTG | | | | | | |
| | CTTTTTT | | | | | | |
| TAR573 | TTCAGGCTGGAGGCACATTAGTTTAAGAGCTAAGC | 44711226 | RNA991- | 90.3 | 91.8 | 91.05017 | 1586 |
| | TGGAAACAGCATAGCAAGTTTAAATAAGGCTAGTC | | 001 | | | | |
| | CGTTATCAACTTGAAAAAGTGGCACCGAGTCGGTG | | | | | | |
| | CTTTTTT | | | | | | |
| TAR705 | CTCCCCCAGCGCAGCTGGAGGTTTAAGAGCTAAGC | 44711960 | RNA966- | 99.8 | 99.4 | 99.6004 | 1587 |
| | TGGAAACAGCATAGCAAGTTTAAATAAGGCTAGTC | | 001 | | | | |
| | CGTTATCAACTTGAAAAAGTGGCACCGAGTCGGTG | | | | | | |
| | CTTTTTT | | | | | | |
| TAR649 | TAGTCCAGGGCTGGATCTCGGTTTAAGAGCTAAGC | 44711740 | RNA1008- | 99.7 | 99.6 | 99.64998 | 1588 |
| | TGGAAACAGCATAGCAAGTTTAAATAAGGCTAGTC | | 001 | | | | |
| | CGTTATCAACTTGAAAAAGTGGCACCGAGTCGGTG | | | | | | |
| | CTTTTTT | | | | | | |
| TAR645 | CCAGCCCTGGACTAGCCCCAGTTTAAGAGCTAAGC | 44711731 | RNA969- | 99.1 | 99.5 | 99.30308 | 1589 |
| | TGGAAACAGCATAGCAAGTTTAAATAAGGCTAGTC | | 001 | | | | |
| | CGTTATCAACTTGAAAAAGTGGCACCGAGTCGGTG | | | | | | |
| | CTTTTTT | | | | | | |
| TAR571 | GGCCAGTCTGCAAAGCGAGGGTTTAAGAGCTAAGC | 44711200 | RNA1007- | 94.3 | 95.5 | 94.898 | 1590 |
| | TGGAAACAGCATAGCAAGTTTAAATAAGGCTAGTC | | 001 | | | | |
| | CGTTATCAACTTGAAAAAGTGGCACCGAGTCGGTG | | | | | | |
| | CTTTTTT | | | | | | |
| TAR655 | ATCTCGGGGAAGCGGCGGGGGTTTAAGAGCTAAGC | 44711754 | RNA127- | 99.8 | 99.8 | 99.8 | 1591 |
| | TGGAAACAGCATAGCAAGTTTAAATAAGGCTAGTC | | 002 | | | | |
| | CGTTATCAACTTGAAAAAGTGGCACCGAGTCGGTG | | | | | | |
| | CTTTTTT | | | | | | |
| TAR174 | GGCGCGCACCCCAGATCGGAGTTTAAGAGCTAAGC | 44711283 | RNA964- | 80.1 | 84.9 | 82.50189 | 1592 |
| | TGGAAACAGCATAGCAAGTTTAAATAAGGCTAGTC | | 001 | | | | |
| | CGTTATCAACTTGAAAAAGTGGCACCGAGTCGGTG | | | | | | |
| | CTTTTTT | | | | | | |
| TAR175 | GAGTCTCGTGATGTTTAAGAGTTTAAGAGCTAAGC | 44711350 | RNA995- | 96.4 | 95.2 | 95.79001 | 1593 |
| | TGGAAACAGCATAGCAAGTTTAAATAAGGCTAGTC | | 001 | | | | |
| | CGTTATCAACTTGAAAAAGTGGCACCGAGTCGGTG | | | | | | |
| | CTTTTTT | | | | | | |
| TAR260 | CACGCGTTTAATATAAGTGGGTTTAAGAGCTAAGC | 44711477 | RNA998- | 97.7 | 99.1 | 98.40265 | 1594 |
| | TGGAAACAGCATAGCAAGTTTAAATAAGGCTAGTC | | 001 | | | | |
| | CGTTATCAACTTGAAAAAGTGGCACCGAGTCGGTG | | | | | | |
| | CTTTTTT | | | | | | |
| TAR707 | CCCCACTCCAGCTGCGCTGGGTTTAAGAGCTAAGC | 44711962 | RNA943- | 99.8 | 99.7 | 99.7501 | 1595 |
| | TGGAAACAGCATAGCAAGTTTAAATAAGGCTAGTC | | 001 | | | | |
| | CGTTATCAACTTGAAAAAGTGGCACCGAGTCGGTG | | | | | | |
| | CTTTTTT | | | | | | |
| TAR683 | CTTTGGCCTACGGCGACGGGGTTTAAGAGCTAAGC | 44711850 | RNA952- | 99.8 | 99.8 | 99.8 | 1596 |
| | TGGAAACAGCATAGCAAGTTTAAATAAGGCTAGTC | | 001 | | | | |
| | CGTTATCAACTTGAAAAAGTGGCACCGAGTCGGTG | | | | | | |
| | CTTTTTT | | | | | | |
| TAR606 | CAATCAGGACAAGGCCCGCAGTTTAAGAGCTAAGC | 44711448 | RNA942- | 99.5 | 99.6 | 99.54999 | 1597 |
| | TGGAAACAGCATAGCAAGTTTAAATAAGGCTAGTC | | 001 | | | | |
| | CGTTATCAACTTGAAAAAGTGGCACCGAGTCGGTG | | | | | | |
| | CTTTTTT | | | | | | |
| TAR746 | TTCGCATGTCCTAGCACCTCGTTTAAGAGCTAAGC | 44712143 | RNA946- | 99.7 | 99.6 | 99.64953 | 1598 |
| | TGGAAACAGCATAGCAAGTTTAAATAAGGCTAGTC | | 001 | | | | |
| | CGTTATCAACTTGAAAAAGTGGCACCGAGTCGGTG | | | | | | |
| | CTTTTTT | | | | | | |
| TAR603 | GCTGGCTTGGAGACAGGTGAGTTTAAGAGCTAAGC | 44711424 | RNA940- | 99.8 | 99.7 | 99.75019 | 1599 |
| | TGGAAACAGCATAGCAAGTTTAAATAAGGCTAGTC | | 001 | | | | |
| | CGTTATCAACTTGAAAAAGTGGCACCGAGTCGGTG | | | | | | |
| | CTTTTTT | | | | | | |
| TAR714 | GCGCAGCTGGAGTGGGGGACGTTTAAGAGCTAAGC | 44711968 | RNA984- | 99.8 | 99.9 | 99.85019 | 1600 |
| | TGGAAACAGCATAGCAAGTTTAAATAAGGCTAGTC | | 001 | | | | |
| | CGTTATCAACTTGAAAAAGTGGCACCGAGTCGGTG | | | | | | |
| | CTTTTTT | | | | | | |
| TAR619 | AAGGACCAGAGCGGGAGGGTGTTTAAGAGCTAAGC | 44711623 | RNA1004- | 68.1 | 65 | 66.51291 | 1601 |
| | TGGAAACAGCATAGCAAGTTTAAATAAGGCTAGTC | | 001 | | | | |
| | CGTTATCAACTTGAAAAAGTGGCACCGAGTCGGTG | | | | | | |
| | CTTTTTT | | | | | | |
| TAR685 | GCCTACGGCGACGGGAGGGTGTTTAAGAGCTAAGC | 44711855 | RNA1003- | 99.4 | 99.4 | 99.4 | 1602 |
| | TGGAAACAGCATAGCAAGTTTAAATAAGGCTAGTC | | 001 | | | | |
| | CGTTATCAACTTGAAAAAGTGGCACCGAGTCGGTG | | | | | | |
| | CTTTTTT | | | | | | |
| TAR626 | GGGCCACAGAGGGTGCAGAGGTTTAAGAGCTAAGC | 44711652 | RNA931- | 99.5 | 99.6 | 99.54979 | 1603 |
| | TGGAAACAGCATAGCAAGTTTAAATAAGGCTAGTC | | 001 | | | | |
| | CGTTATCAACTTGAAAAAGTGGCACCGAGTCGGTG | | | | | | |
| | CTTTTTT | | | | | | |
| TAR759 | CGCGACGTTTGTAGAATGCTGTTTAAGAGCTAAGC | 44712202 | RNA990- | 99.5 | 99.1 | 99.29747 | 1604 |
| | TGGAAACAGCATAGCAAGTTTAAATAAGGCTAGTC | | 001 | | | | |
| | CGTTATCAACTTGAAAAAGTGGCACCGAGTCGGTG | | | | | | |
| | CTTTTTT | | | | | | |
| TAR670 | GCGCTACTTGCCCCTTTCGGGTTTAAGAGCTAAGC | \|44711813 | RNA151- | 99.8 | 99.8 | 99.8 | 1605 |
| | TGGAAACAGCATAGCAAGTTTAAATAAGGCTAGTC | | 002 | | | | |
| | CGTTATCAACTTGAAAAAGTGGCACCGAGTCGGTG | | | | | | |
| | CTTTTTT | | | | | | |
| TAR177 | GTGCCCAGCCAATCAGGACAGTTTAAGAGCTAAGC | 44711461 | RNA934- | 99.8 | 99.5 | 99.65005 | 1606 |
| | TGGAAACAGCATAGCAAGTTTAAATAAGGCTAGTC | | 001 | | | | |
| | CGTTATCAACTTGAAAAAGTGGCACCGAGTCGGTG | | | | | | |
| | CTTTTTT | | | | | | |
| TAR692 | AGCGTCAGAGCGCCGAGGTTGTTTAAGAGCTAAGC | 44711900 | RNA994- | 99.9 | 99.6 | 99.7513 | 1607 |
| | TGGAAACAGCATAGCAAGTTTAAATAAGGCTAGTC | | 001 | | | | |
| | CGTTATCAACTTGAAAAAGTGGCACCGAGTCGGTG | | | | | | |
| | CTTTTTT | | | | | | |
| TAR583 | CGCGCCCCAGCTTGGGACACGTTTAAGAGCTAAGC | 44711265 | RNA988- | 54.1 | 66.7 | 60.45832 | 1608 |
| | TGGAAACAGCATAGCAAGTTTAAATAAGGCTAGTC | | 001 | | | | |
| | CGTTATCAACTTGAAAAAGTGGCACCGAGTCGGTG | | | | | | |
| | CTTTTTT | | | | | | |
| TAR581 | GCGCCCGGTGTCCCAAGCTGGTTTAAGAGCTAAGC | 44711261 | RNA949- | 70.6 | 72.5 | 71.56128 | 1609 |
| | TGGAAACAGCATAGCAAGTTTAAATAAGGCTAGTC | | 001 | | | | |
| | CGTTATCAACTTGAAAAAGTGGCACCGAGTCGGTG | | | | | | |
| | CTTTTTT | | | | | | |
| TAR600 | CAAGCCAGCGACGCAGTGCCGTTTAAGAGCTAAGC | 44711410 | RNA958- | 97.8 | 98.3 | 98.05133 | 1610 |
| | TGGAAACAGCATAGCAAGTTTAAATAAGGCTAGTC | | 001 | | | | |
| | CGTTATCAACTTGAAAAAGTGGCACCGAGTCGGTG | | | | | | |
| | CTTTTTT | | | | | | |
| TAR713 | AGCGCAGCTGGAGTGGGGGAGTTTAAGAGCTAAGC | 44711967 | RNA982- | 99.1 | 98.7 | 98.89209 | 1611 |
| | TGGAAACAGCATAGCAAGTTTAAATAAGGCTAGTC | | 001 | | | | |
| | CGTTATCAACTTGAAAAAGTGGCACCGAGTCGGTG | | | | | | |
| | CTTTTTT | | | | | | |
| TAR650 | GCTTCCCCGAGATCCAGCCCGTTTAAGAGCTAAGC | 44711744 | RNA983- | 99.4 | 99.3 | 99.34988 | 1612 |
| | TGGAAACAGCATAGCAAGTTTAAATAAGGCTAGTC | | 001 | | | | |
| | CGTTATCAACTTGAAAAAGTGGCACCGAGTCGGTG | | | | | | |
| | CTTTTTT | | | | | | |
| TAR727 | AACGCGTGGAGGGGCGCTTGGTTTAAGAGCTAAGC | \|44712027 | RNA957- | 99.5 | 99.7 | 99.60067 | 1613 |
| | TGGAAACAGCATAGCAAGTTTAAATAAGGCTAGTC | | 001 | | | | |
| | CGTTATCAACTTGAAAAAGTGGCACCGAGTCGGTG | | | | | | |
| | CTTTTTT | | | | | | |
| TAR605 | AGACAGGTGACGGTCCCTGCGTTTAAGAGCTAAGC | 44711434 | RNA928- | 99.6 | 99.3 | 99.45077 | 1614 |
| | TGGAAACAGCATAGCAAGTTTAAATAAGGCTAGTC | | 001 | | | | |
| | CGTTATCAACTTGAAAAAGTGGCACCGAGTCGGTG | | | | | | |
| | CTTTTTT | | | | | | |
| TAR613 | AGTGGAGGCGTCGCGCTGGCGTTTAAGAGCTAAGC | 44711492 | RNA930- | 99.7 | 99.7 | 99.7 | 1615 |
| | TGGAAACAGCATAGCAAGTTTAAATAAGGCTAGTC | | 001 | | | | |
| | CGTTATCAACTTGAAAAAGTGGCACCGAGTCGGTG | | | | | | |
| | CTTTTTT | | | | | | |
| TAR550 | GAGAATGGAGAAACCCTGCAGTTTAAGAGCTAAGC | 44711022 | RNA941- | 99.7 | 99.7 | 99.7 | 1616 |
| | TGGAAACAGCATAGCAAGTTTAAATAAGGCTAGTC | | 001 | | | | |
| | CGTTATCAACTTGAAAAAGTGGCACCGAGTCGGTG | | | | | | |
| | CTTTTTT | | | | | | |
| TAR679 | CAGGGGAGACCTTTGGCCTAGTTTAAGAGCTAAGC | 44711840 | RNA968- | 99.7 | 99.9 | 99.80113 | 1617 |
| | TGGAAACAGCATAGCAAGTTTAAATAAGGCTAGTC | | 001 | | | | |
| | CGTTATCAACTTGAAAAAGTGGCACCGAGTCGGTG | | | | | | |
| | CTTTTTT | | | | | | |
| TAR709 | CCCCAGCGCAGCTGGAGTGGGTTTAAGAGCTAAGC | 44711963 | RNA944- | 99.8 | 99.8 | 99.8 | 1618 |
| | TGGAAACAGCATAGCAAGTTTAAATAAGGCTAGTC | | 001 | | | | |
| | CGTTATCAACTTGAAAAAGTGGCACCGAGTCGGTG | | | | | | |
| | CTTTTTT | | | | | | |
| TAR680 | AGACCTTTGGCCTACGGCGAGTTTAAGAGCTAAGC | 44711846 | RNA967- | 99.8 | 99.9 | 99.85017 | 1619 |
| | TGGAAACAGCATAGCAAGTTTAAATAAGGCTAGTC | | 001 | | | | |
| | CGTTATCAACTTGAAAAAGTGGCACCGAGTCGGTG | | | | | | |
| | CTTTTTT | | | | | | |
| TAR694 | CGTCAGAGCGCCGAGGTTGGGTTTAAGAGCTAAGC | 44711902 | RNA975- | 99.8 | 99.7 | 99.74978 | 1620 |
| | TGGAAACAGCATAGCAAGTTTAAATAAGGCTAGTC | | 001 | | | | |
| | CGTTATCAACTTGAAAAAGTGGCACCGAGTCGGTG | | | | | | |
| | CTTTTTT | | | | | | |
| TAR634 | CACCAAGGAGAACTTGGAGAGTTTAAGAGCTAAGC | 44711703 | RNA992- | 99.8 | 99.8 | 99.8 | 1621 |
| | TGGAAACAGCATAGCAAGTTTAAATAAGGCTAGTC | | 001 | | | | |
| | CGTTATCAACTTGAAAAAGTGGCACCGAGTCGGTG | | | | | | |
| | CTTTTTT | | | | | | |
| TAR678 | CGGGGAGCAGGGGAGACCTTGTTTAAGAGCTAAGC | 44711833 | RNA1006- | 99.9 | 99.8 | 99.85029 | 1622 |
| | TGGAAACAGCATAGCAAGTTTAAATAAGGCTAGTC | | 001 | | | | |
| | CGTTATCAACTTGAAAAAGTGGCACCGAGTCGGTG | | | | | | |
| | CTTTTTT | | | | | | |
| TAR546 | ATAGTCCCAAAAGCATCCTGGTTTAAGAGCTAAGC | 44710987 | RNA150- | 99.9 | 99.9 | 99.9 | 1623 |
| | TGGAAACAGCATAGCAAGTTTAAATAAGGCTAGTC | | 002 | | | | |
| | CGTTATCAACTTGAAAAAGTGGCACCGAGTCGGTG | | | | | | |
| | CTTTTTT | | | | | | |
| TAR674 | CCCCTGCTCCCCGCCGAAAGGTTTAAGAGCTAAGC | 44711823 | RNA948- | 100 | 99.5 | 99.71967 | 1624 |
| | TGGAAACAGCATAGCAAGTTTAAATAAGGCTAGTC | | 001 | | | | |
| | CGTTATCAACTTGAAAAAGTGGCACCGAGTCGGTG | | | | | | |
| | CTTTTTT | | | | | | |
| TAR591 | TGAGTTTGCTGTCTGTACATGTTTAAGAGCTAAGC | 44711307 | RNA974- | 88.4 | 85.5 | 86.93537 | 1625 |
| | TGGAAACAGCATAGCAAGTTTAAATAAGGCTAGTC | | 001 | | | | |
| | CGTTATCAACTTGAAAAAGTGGCACCGAGTCGGTG | | | | | | |
| | CTTTTTT | | | | | | |
| TAR602 | TGCGTCGCTGGCTTGGAGACGTTTAAGAGCTAAGC | 44711418 | RNA953- | 96.6 | 97.9 | 97.25631 | 1626 |
| | TGGAAACAGCATAGCAAGTTTAAATAAGGCTAGTC | | 001 | | | | |
| | CGTTATCAACTTGAAAAAGTGGCACCGAGTCGGTG | | | | | | |
| | CTTTTTT | | | | | | |
| TAR267 | GGGTGCAGAGCGGGAGAGGAGTTTAAGAGCTAAGC | 44711642 | RNA954- | 99.3 | 99.6 | 99.45816 | 1627 |
| | TGGAAACAGCATAGCAAGTTTAAATAAGGCTAGTC | | 001 | | | | |
| | CGTTATCAACTTGAAAAAGTGGCACCGAGTCGGTG | | | | | | |
| | CTTTTTT | | | | | | |
| TAR756 | TGTGGGGCCACACCGTGGGGGTTTAAGAGCTAAGC | 44712171 | RNA1005- | 99.4 | 99.6 | 99.50107 | 1628 |
| | TGGAAACAGCATAGCAAGTTTAAATAAGGCTAGTC | | 001 | | | | |
| | CGTTATCAACTTGAAAAAGTGGCACCGAGTCGGTG | | | | | | |
| | CTTTTTT | | | | | | |
| TAR625 | GGCCACAGAGGGTGCAGAGCGTTTAAGAGCTAAGC | 44711651 | RNA950- | 99.4 | 99.4 | 99.4 | 1629 |
| | TGGAAACAGCATAGCAAGTTTAAATAAGGCTAGTC | | 001 | | | | |
| | CGTTATCAACTTGAAAAAGTGGCACCGAGTCGGTG | | | | | | |
| | CTTTTTT | | | | | | |
| TAR262 | TTCCTGAAGCTGACAGCATTGTTTAAGAGCTAAGC | 44711517 | RNA999- | 99.5 | 99.8 | 99.64957 | 1630 |
| | TGGAAACAGCATAGCAAGTTTAAATAAGGCTAGTC | | 001 | | | | |
| | CGTTATCAACTTGAAAAAGTGGCACCGAGTCGGTG | | | | | | |
| | CTTTTTT | | | | | | |
| TAR545 | TCCTGAGGACAGCTCAGAGAGTTTAAGAGCTAAGC | 44710972 | RNA973- | 99.7 | 99.8 | 99.75011 | 1631 |
| | TGGAAACAGCATAGCAAGTTTAAATAAGGCTAGTC | | 001 | | | | |
| | CGTTATCAACTTGAAAAAGTGGCACCGAGTCGGTG | | | | | | |
| | CTTTTTT | | | | | | |
| TAR750 | TAGCACCTCTGGGTCTATGTGTTTAAGAGCTAAGC | 44712154 | RNA1002- | 99.8 | 99.9 | 99.85073 | 1632 |
| | TGGAAACAGCATAGCAAGTTTAAATAAGGCTAGTC | | 001 | | | | |
| | CGTTATCAACTTGAAAAAGTGGCACCGAGTCGGTG | | | | | | |
| | CTTTTTT | | | | | | |
| TAR610 | AAACGCGTGCCCAGCCAATCGTTTAAGAGCTAAGC | 44711463 | RNA945- | 99.8 | 99.9 | 99.85041 | 1633 |
| | TGGAAACAGCATAGCAAGTTTAAATAAGGCTAGTC | | 001 | | | | |
| | CGTTATCAACTTGAAAAAGTGGCACCGAGTCGGTG | | | | | | |
| | CTTTTTT | | | | | | |
| TAR665 | TGGGGAAGGGGGTGCGCACCGTTTAAGAGCTAAGC | 44711785 | RNA951- | 99.8 | 99.8 | 99.8 | 1634 |
| | TGGAAACAGCATAGCAAGTTTAAATAAGGCTAGTC | | 001 | | | | |
| | CGTTATCAACTTGAAAAAGTGGCACCGAGTCGGTG | | | | | | |
| | CTTTTTT | | | | | | |
| TAR726 | GAACGCGTGGAGGGGCGCTTGTTTAAGAGCTAAGC | 44712026 | RNA970- | 99.8 | 99.8 | 99.8 | 1635 |
| | TGGAAACAGCATAGCAAGTTTAAATAAGGCTAGTC | | 001 | | | | |
| | CGTTATCAACTTGAAAAAGTGGCACCGAGTCGGTG | | | | | | |
| | CTTTTTT | | | | | | |
| TAR749 | CTAGCACCTCTGGGTCTATGGTTTAAGAGCTAAGC | 44712153 | RNA979- | 99.8 | 99.9 | 99.85025 | 1636 |
| | TGGAAACAGCATAGCAAGTTTAAATAAGGCTAGTC | | 001 | | | | |
| | CGTTATCAACTTGAAAAAGTGGCACCGAGTCGGTG | | | | | | |
| | CTTTTTT | | | | | | |
| TAR736 | CCGCAGCAGACAGGCTTACCGTTTAAGAGCTAAGC | 44712067 | RNA993- | 99.8 | 99.8 | 99.8 | 1637 |
| | TGGAAACAGCATAGCAAGTTTAAATAAGGCTAGTC | | 001 | | | | |
| | CGTTATCAACTTGAAAAAGTGGCACCGAGTCGGTG | | | | | | |
| | CTTTTTT | | | | | | |
| TAR562 | TCCGAGCAGTTAACTGGCTGGTTTAAGAGCTAAGC | 44711147 | RNA933- | 99.9 | 99.4 | 99.65094 | 1638 |
| | TGGAAACAGCATAGCAAGTTTAAATAAGGCTAGTC | | 001 | | | | |
| | CGTTATCAACTTGAAAAAGTGGCACCGAGTCGGTG | | | | | | |
| | CTTTTTT | | | | | | |
| TAR590 | TACATCGGCGCCCTCCGATCGTTTAAGAGCTAAGC | 44711292 | RNA938- | 99.3 | 99.5 | 99.401 | 1639 |
| | TGGAAACAGCATAGCAAGTTTAAATAAGGCTAGTC | | 001 | | | | |
| | CGTTATCAACTTGAAAAAGTGGCACCGAGTCGGTG | | | | | | |
| | CTTTTTT | | | | | | |
| N/A | N/A | N/A | no gRNA | 99.7 | 99.7 | 99.7 | |
| TAR615 | CTCGCGCTACTCTCTCTTTCGTTTAAGAGCTAAGC | 44711573 | RNA956- | 99.6 | 99.7 | 99.64983 | 1640 |
| | TGGAAACAGCATAGCAAGTTTAAATAAGGCTAGTC | | 001 | | | | |
| | CGTTATCAACTTGAAAAAGTGGCACCGAGTCGGTG | | | | | | |
| | CTTTTTT | | | | | | |
| TAR695 | CAGAGCGCCGAGGTTGGGGGGTTTAAGAGCTAAGC | 44711905 | RNA963- | 99.7 | 99.9 | 99.80094 | 1641 |
| | TGGAAACAGCATAGCAAGTTTAAATAAGGCTAGTC | | 001 | | | | |
| | CGTTATCAACTTGAAAAAGTGGCACCGAGTCGGTG | | | | | | |
| | CTTTTTT | | | | | | |
| TAR648 | CTAGTCCAGGGCTGGATCTCGTTTAAGAGCTAAGC | 44711739 | RNA980- | 99.7 | 99.8 | 99.75027 | 1642 |
| | TGGAAACAGCATAGCAAGTTTAAATAAGGCTAGTC | | 001 | | | | |
| | CGTTATCAACTTGAAAAAGTGGCACCGAGTCGGTG | | | | | | |
| | CTTTTTT | | | | | | |
| TAR693 | GCGTCAGAGCGCCGAGGTTGGTTTAAGAGCTAAGC | 44711901 | RNA996- | 99.7 | 99.9 | 99.79984 | 1643 |
| | TGGAAACAGCATAGCAAGTTTAAATAAGGCTAGTC | | 001 | | | | |
| | CGTTATCAACTTGAAAAAGTGGCACCGAGTCGGTG | | | | | | |
| | CTTTTTT | | | | | | |
| TAR728 | GTGGAGGGGCGCTTGGGGTCGTTTAAGAGCTAAGC | 44712032 | RNA929- | 99.8 | 99.8 | 99.8 | 1644 |
| | TGGAAACAGCATAGCAAGTTTAAATAAGGCTAGTC | | 001 | | | | |
| | CGTTATCAACTTGAAAAAGTGGCACCGAGTCGGTG | | | | | | |
| | CTTTTTT | | | | | | |
| TAR658 | GCGGCGGGGTGGCCTGGGAGGTTTAAGAGCTAAGC | 44711765 | RNA935- | 99.8 | 99.7 | 99.74987 | 1645 |
| | TGGAAACAGCATAGCAAGTTTAAATAAGGCTAGTC | | 001 | | | | |
| | CGTTATCAACTTGAAAAAGTGGCACCGAGTCGGTG | | | | | | |
| | CTTTTTT | | | | | | |
| TAR640 | AGCCCCACGGCGGGCCACCAGTTTAAGAGCTAAGC | 44711718 | RNA965- | 99.8 | 98.8 | 99.29914 | 1646 |
| | TGGAAACAGCATAGCAAGTTTAAATAAGGCTAGTC | | 001 | | | | |
| | CGTTATCAACTTGAAAAAGTGGCACCGAGTCGGTG | | | | | | |
| | CTTTTTT | | | | | | |
| TAR691 | AAGCGTCAGAGCGCCGAGGTGTTTAAGAGCTAAGC | 44711899 | RNA978- | 99.8 | 99.6 | 99.69994 | 1647 |
| | TGGAAACAGCATAGCAAGTTTAAATAAGGCTAGTC | | 001 | | | | |
| | CGTTATCAACTTGAAAAAGTGGCACCGAGTCGGTG | | | | | | |
| | CTTTTTT | | | | | | |
| TAR635 | CTTCTCCAAGTTCTCCTTGGGTTTAAGAGCTAAGC | 44711704 | RNA976- | 99.9 | 99.8 | 99.84984 | 1648 |
| | TGGAAACAGCATAGCAAGTTTAAATAAGGCTAGTC | | 001 | | | | |
| | CGTTATCAACTTGAAAAAGTGGCACCGAGTCGGTG | | | | | | |
| | CTTTTTT | | | | | | |
| N/A | N/A | N/A | WTcas9 | 2.705 | | 2.705 | |
| | | | RNA104 | | | | |
| TAR739 | CGGCTCTGCTTCCCTTAGACGTTTAAGAGCTAAGC | 44712087 | RNA138- | | | #DIV/0! | 1649 |
| | TGGAAACAGCATAGCAAGTTTAAATAAGGCTAGTC | | 002 | | | | |
| | CGTTATCAACTTGAAAAAGTGGCACCGAGTCGGTG | | | | | | |
| | CTTTTTT | | | | | | |
| TAR578 | GGACACCGGGCGCTCATTCTGTTTAAGAGCTAAGC | 44711251 | RNA1013- | 66.2 | 99.6 | 83.24868 | 1650 |
| | TGGAAACAGCATAGCAAGTTTAAATAAGGCTAGTC | | 001 | | | | |
| | CGTTATCAACTTGAAAAAGTGGCACCGAGTCGGTG | | | | | | |
| | CTTTTTT | | | | | | |
| TAR582 | GCGCCCCAGCTTGGGACACCGTTTAAGAGCTAAGC | 44711264 | RNA110- | 66.9 | 99.7 | 83.64276 | 1651 |
| | TGGAAACAGCATAGCAAGTTTAAATAAGGCTAGTC | | 002 | | | | |
| | CGTTATCAACTTGAAAAAGTGGCACCGAGTCGGTG | | | | | | |
| | CTTTTTT | | | | | | |
| TAR181 | GAGGAAGGACCAGAGCGGGAGTTTAAGAGCTAAGC | 44711631 | RNA102- | 67.6 | 99.3 | 83.64775 | 1652 |
| | TGGAAACAGCATAGCAAGTTTAAATAAGGCTAGTC | | 002 | | | | |
| | CGTTATCAACTTGAAAAAGTGGCACCGAGTCGGTG | | | | | | |
| | CTTTTTT | | | | | | |
| TAR597 | GCAGTGCCAGGTTAGAGAGAGTTTAAGAGCTAAGC | 44711398 | RNA1058- | 71.5 | 99.6 | 85.87861 | 1653 |
| | TGGAAACAGCATAGCAAGTTTAAATAAGGCTAGTC | | 001 | | | | |
| | CGTTATCAACTTGAAAAAGTGGCACCGAGTCGGTG | | | | | | |
| | CTTTTTT | | | | | | |
| TAR638 | TCTCCTTGGTGGCCCGCCGTGTTTAAGAGCTAAGC | 44711715 | RNA124- | | | #DIV/0! | 1654 |
| | TGGAAACAGCATAGCAAGTTTAAATAAGGCTAGTC | | 002 | | | | |
| | CGTTATCAACTTGAAAAAGTGGCACCGAGTCGGTG | | | | | | |
| | CTTTTTT | | | | | | |
| TAR179 | CGCGAGCACAGCTAAGGCCAGTTTAAGAGCTAAGC | 44711560 | RNA101- | 75.6 | 99.2 | 87.68474 | 1655 |
| | TGGAAACAGCATAGCAAGTTTAAATAAGGCTAGTC | | 002 | | | | |
| | CGTTATCAACTTGAAAAAGTGGCACCGAGTCGGTG | | | | | | |
| | CTTTTTT | | | | | | |
| TAR264 | GGCCACGGAGCGAGACATCTGTTTAAGAGCTAAGC | 44711541 | RNA104- | 77.7 | 99.4 | 88.66349 | 1562 |
| | TGGAAACAGCATAGCAAGTTTAAATAAGGCTAGTC | | 002 | | | | |
| | CGTTATCAACTTGAAAAAGTGGCACCGAGTCGGTG | | | | | | |
| | CTTTTTT | | | | | | |
| TAR575 | CTCATTCTAGGACTTCAGGCGTTTAAGAGCTAAGC | 44711239 | RNA108- | | | #DIV/0! | 1657 |
| | TGGAAACAGCATAGCAAGTTTAAATAAGGCTAGTC | | 002 | | | | |
| | CGTTATCAACTTGAAAAAGTGGCACCGAGTCGGTG | | | | | | |
| | CTTTTTT | | | | | | |
| TAR598 | CGCAGTGCCAGGTTAGAGAGGTTTAAGAGCTAAGC | 44711399 | RNA112- | 86.6 | 99.7 | 93.29255 | 1658 |
| | TGGAAACAGCATAGCAAGTTTAAATAAGGCTAGTC | | 002 | | | | |
| | CGTTATCAACTTGAAAAAGTGGCACCGAGTCGGTG | | | | | | |
| | CTTTTTT | | | | | | |
| TAR612 | TATAAGTGGAGGCGTCGCGCGTTTAAGAGCTAAGC | 44711488 | RNA1040- | 87.1 | 99.7 | 93.55978 | 1659 |
| | TGGAAACAGCATAGCAAGTTTAAATAAGGCTAGTC | | 001 | | | | |
| | CGTTATCAACTTGAAAAAGTGGCACCGAGTCGGTG | | | | | | |
| | CTTTTTT | | | | | | |
| TAR264 | GGCCACGGAGCGAGACATCTGTTTAAGAGCTAAGC | 44711541 | RNA104- | 89 | 99.7 | 94.4469 | 1562 |
| | TGGAAACAGCATAGCAAGTTTAAATAAGGCTAGTC | | 002 | | | | |
| | CGTTATCAACTTGAAAAAGTGGCACCGAGTCGGTG | | | | | | |
| | CTTTTTT | | | | | | |
| TAR265 | GAGTAGCGCGAGCACAGCTAGTTTAAGAGCTAAGC | 44711562 | RNA105- | 89.9 | 99.8 | 94.96374 | 1571 |
| | TGGAAACAGCATAGCAAGTTTAAATAAGGCTAGTC | | 002 | | | | |
| | CGTTATCAACTTGAAAAAGTGGCACCGAGTCGGTG | | | | | | |
| | CTTTTTT | | | | | | |
| TAR263 | TCCTGAAGCTGACAGCATTCGTTTAAGAGCTAAGC | 44711518 | RNA103- | 90.1 | 99.7 | 95.00724 | 1662 |
| | TGGAAACAGCATAGCAAGTTTAAATAAGGCTAGTC | | 002 | | | | |
| | CGTTATCAACTTGAAAAAGTGGCACCGAGTCGGTG | | | | | | |
| | CTTTTTT | | | | | | |
| TAR623 | CAGAGGGTGCAGAGCGGGAGGTTTAAGAGCTAAGC | 44711646 | RNA1039- | 91.4 | 99.5 | 95.53284 | 1663 |
| | TGGAAACAGCATAGCAAGTTTAAATAAGGCTAGTC | | 001 | | | | |
| | CGTTATCAACTTGAAAAAGTGGCACCGAGTCGGTG | | | | | | |
| | CTTTTTT | | | | | | |
| TAR176 | GAAAGTCCCTCTCTCTAACCGTTTAAGAGCTAAGC | 44711393 | RNA1054- | 91.5 | 99.7 | 95.6847 | 1664 |
| | TGGAAACAGCATAGCAAGTTTAAATAAGGCTAGTC | | 001 | | | | |
| | CGTTATCAACTTGAAAAAGTGGCACCGAGTCGGTG | | | | | | |
| | CTTTTTT | | | | | | |
| TAR570 | GGGCCAGTCTGCAAAGCGAGGTTTAAGAGCTAAGC | 44711199 | RNA1017- | 95.5 | 99.6 | 97.59375 | 1665 |
| | TGGAAACAGCATAGCAAGTTTAAATAAGGCTAGTC | | 001 | | | | |
| | CGTTATCAACTTGAAAAAGTGGCACCGAGTCGGTG | | | | | | |
| | CTTTTTT | | | | | | |
| TAR631 | AACTTGGAGAAGGGAAGTCAGTTTAAGAGCTAAGC | 44711693 | RNA119- | 96.4 | 99.8 | 98.14027 | 1666 |
| | TGGAAACAGCATAGCAAGTTTAAATAAGGCTAGTC | | 002 | | | | |
| | CGTTATCAACTTGAAAAAGTGGCACCGAGTCGGTG | | | | | | |
| | CTTTTTT | | | | | | |
| TAR266 | ACTCACGCTGGATAGCCTCCGTTTAAGAGCTAAGC | 44711596 | RNA106- | 97.1 | 99.8 | 98.48006 | 1667 |
| | TGGAAACAGCATAGCAAGTTTAAATAAGGCTAGTC | | 002 | | | | |
| | CGTTATCAACTTGAAAAAGTGGCACCGAGTCGGTG | | | | | | |
| | CTTTTTT | | | | | | |
| TAR628 | GAGCACAGCGAGGGCCACAGGTTTAAGAGCTAAGC | 44711663 | RNA1036- | 97.7 | 99.7 | 98.71413 | 1668 |
| | TGGAAACAGCATAGCAAGTTTAAATAAGGCTAGTC | | 001 | | | | |
| | CGTTATCAACTTGAAAAAGTGGCACCGAGTCGGTG | | | | | | |
| | CTTTTTT | | | | | | |
| TAR621 | GGGAGAGGAAGGACCAGAGCGTTTAAGAGCTAAGC | 44711631 | RNA116- | 97.9 | 99.8 | 98.86789 | 1669 |
| | TGGAAACAGCATAGCAAGTTTAAATAAGGCTAGTC | | 002 | | | | |
| | CGTTATCAACTTGAAAAAGTGGCACCGAGTCGGTG | | | | | | |
| | CTTTTTT | | | | | | |
| TAR627 | AGCACAGCGAGGGCCACAGAGTTTAAGAGCTAAGC | 44711662 | RNA117- | 97.9 | 99.8 | 98.87215 | 1670 |
| | TGGAAACAGCATAGCAAGTTTAAATAAGGCTAGTC | | 002 | | | | |
| | CGTTATCAACTTGAAAAAGTGGCACCGAGTCGGTG | | | | | | |
| | CTTTTTT | | | | | | |
| TAR594 | CATCACGAGACTCTAAGAAAGTTTAAGAGCTAAGC | 44711356 | RNA1029- | 98 | 99.8 | 98.91827 | 1671 |
| | TGGAAACAGCATAGCAAGTTTAAATAAGGCTAGTC | | 001 | | | | |
| | CGTTATCAACTTGAAAAAGTGGCACCGAGTCGGTG | | | | | | |
| | CTTTTTT | | | | | | |
| TAR629 | GGAGCGAGAGAGCACAGCGAGTTTAAGAGCTAAGC | 44711672 | RNA118- | 98.2 | 99.9 | 99.06186 | 1672 |
| | TGGAAACAGCATAGCAAGTTTAAATAAGGCTAGTC | | 002 | | | | |
| | CGTTATCAACTTGAAAAAGTGGCACCGAGTCGGTG | | | | | | |
| | CTTTTTT | | | | | | |
| TAR622 | CGGGAGAGGAAGGACCAGAGGTTTAAGAGCTAAGC | 44711632 | RNA1043- | 98.3 | 99.8 | 99.06306 | 1673 |
| | TGGAAACAGCATAGCAAGTTTAAATAAGGCTAGTC | | 001 | | | | |
| | CGTTATCAACTTGAAAAAGTGGCACCGAGTCGGTG | | | | | | |
| | CTTTTTT | | | | | | |
| TAR611 | GGGCACGCGTTTAATATAAGGTTTAAGAGCTAAGC | 44711474 | RNA113- | 98.4 | 99.8 | 99.11606 | 1674 |
| | TGGAAACAGCATAGCAAGTTTAAATAAGGCTAGTC | | 002 | | | | |
| | CGTTATCAACTTGAAAAAGTGGCACCGAGTCGGTG | | | | | | |
| | CTTTTTT | | | | | | |
| TAR758 | CGCGTGCTGTTTCCTCCCCAGTTTAAGAGCTAAGC | 44712183 | RNA144- | 98.6 | 99.9 | 99.26303 | 1675 |
| | TGGAAACAGCATAGCAAGTTTAAATAAGGCTAGTC | | 001 | | | | |
| | CGTTATCAACTTGAAAAAGTGGCACCGAGTCGGTG | | | | | | |
| | CTTTTTT | | | | | | |
| TAR735 | CGCAGCAGACAGGCTTACCCGTTTAAGAGCTAAGC | 44712066 | RNA136- | 98.9 | 99.9 | 99.40605 | 1676 |
| | TGGAAACAGCATAGCAAGTTTAAATAAGGCTAGTC | | 002 | | | | |
| | CGTTATCAACTTGAAAAAGTGGCACCGAGTCGGTG | | | | | | |
| | CTTTTTT | | | | | | |
| TAR742 | GTCCACAGCTCTCCAGTCTAGTTTAAGAGCTAAGC | 44712099 | RNA141- | 98.9 | 99.8 | 99.35803 | 1677 |
| | TGGAAACAGCATAGCAAGTTTAAATAAGGCTAGTO | | 002 | | | | |
| | CGTTATCAACTTGAAAAAGTGGCACCGAGTCGGTG | | | | | | |
| | CTTTTTT | | | | | | |
| TAR633 | ACCAAGGAGAACTTGGAGAAGTTTAAGAGCTAAGC | 44711702 | RNA121- | 99.2 | 99.8 | 99.50561 | 1678 |
| | TGGAAACAGCATAGCAAGTTTAAATAAGGCTAGTC | | 002 | | | | |
| | CGTTATCAACTTGAAAAAGTGGCACCGAGTCGGTG | | | | | | |
| | CTTTTTT | | | | | | |
| TAR668 | GGGGCAAGTAGCGCGCGTCCGTTTAAGAGCTAAGC | 44711804 | RNA128- | 99.2 | 99.8 | 99.50632 | 1679 |
| | TGGAAACAGCATAGCAAGTTTAAATAAGGCTAGTC | | 002 | | | | |
| | CGTTATCAACTTGAAAAAGTGGCACCGAGTCGGTG | | | | | | |
| | CTTTTTT | | | | | | |
| TAR741 | TCCACAGCTCTCCAGTCTAAGTTTAAGAGCTAAGC | 44712098 | RNA140- | 99.3 | 99.8 | 99.55471 | 1680 |
| | TGGAAACAGCATAGCAAGTTTAAATAAGGCTAGTC | | 002 | | | | |
| | CGTTATCAACTTGAAAAAGTGGCACCGAGTCGGTG | | | | | | |
| | CTTTTTT | | | | | | |
| TAR662 | GGTGGCCTGGGAGTGGGGAAGTTTAAGAGCTAAGC | 44711772 | RNA1025- | 99.4 | 99.8 | 99.60459 | 1681 |
| | TGGAAACAGCATAGCAAGTTTAAATAAGGCTAGTC | | 001 | | | | |
| | CGTTATCAACTTGAAAAAGTGGCACCGAGTCGGTG | | | | | | |
| | CTTTTTT | | | | | | |
| TAR752 | GTGGCCCCACATAGACCCAGGTTTAAGAGCTAAGC | 44712159 | RNA1033- | 99.4 | 99.9 | 99.65418 | 1682 |
| | TGGAAACAGCATAGCAAGTTTAAATAAGGCTAGTC | | 001 | | | | |
| | CGTTATCAACTTGAAAAAGTGGCACCGAGTCGGTG | | | | | | |
| | CTTTTTT | | | | | | |
| TAR757 | GCTGTTTCCTCCCCACGGTGGTTTAAGAGCTAAGC | 44712178 | RNA1024- | 99.5 | 99.8 | 99.65219 | 1683 |
| | TGGAAACAGCATAGCAAGTTTAAATAAGGCTAGTC | | 001 | | | | |
| | CGTTATCAACTTGAAAAAGTGGCACCGAGTCGGTG | | | | | | |
| | CTTTTTT | | | | | | |
| TAR760 | TGCTTGGCTGTGATACAAAGGTTTAAGAGCTAAGC | 44712218 | RNA1028- | 99.5 | 99.6 | 99.55041 | 1684 |
| | TGGAAACAGCATAGCAAGTTTAAATAAGGCTAGTC | | 001 | | | | |
| | CGTTATCAACTTGAAAAAGTGGCACCGAGTCGGTG | | | | | | |
| | CTTTTTT | | | | | | |
| TAR751 | AGCACCTCTGGGTCTATGTGGTTTAAGAGCTAAGC | 44712155 | RNA1021- | 99.5 | 99.8 | 99.65268 | 1685 |
| | TGGAAACAGCATAGCAAGTTTAAATAAGGCTAGTC | | 001 | | | | |
| | CGTTATCAACTTGAAAAAGTGGCACCGAGTCGGTG | | | | | | |
| | CTTTTTT | | | | | | |
| TAR632 | TCCCTTCTCCAAGTTCTCCTGTTTAAGAGCTAAGC | 44711701 | RNA120- | 99.5 | 99.8 | 99.65211 | 1686 |
| | TGGAAACAGCATAGCAAGTTTAAATAAGGCTAGTC | | 002 | | | | |
| | CGTTATCAACTTGAAAAAGTGGCACCGAGTCGGTG | | | | | | |
| | CTTTTTT | | | | | | |
| TAR740 | TCCCTTAGACTGGAGAGCTGGTTTAAGAGCTAAGC | 44712097 | RNA139- | 99.6 | 99.8 | 99.70223 | 1687 |
| | TGGAAACAGCATAGCAAGTTTAAATAAGGCTAGTC | | 002 | | | | |
| | CGTTATCAACTTGAAAAAGTGGCACCGAGTCGGTG | | | | | | |
| | CTTTTTT | | | | | | |
| TAR689 | GAGGGTCGGGACAAAGTTTAGTTTAAGAGCTAAGC | 44711869 | RNA132- | 99.6 | 99.7 | 99.65101 | 1688 |
| | TGGAAACAGCATAGCAAGTTTAAATAAGGCTAGTC | | 002 | | | | |
| | CGTTATCAACTTGAAAAAGTGGCACCGAGTCGGTG | | | | | | |
| | CTTTTTT | | | | | | |
| TAR178 | GCCCGAATGCTGTCAGCTTCGTTTAAGAGCTAAGC | \|44711523 | RNA1015- | 99.6 | 99.9 | 99.75294 | 1689 |
| | TGGAAACAGCATAGCAAGTTTAAATAAGGCTAGTC | | 001 | | | | |
| | CGTTATCAACTTGAAAAAGTGGCACCGAGTCGGTG | | | | | | |
| | CTTTTTT | | | | | | |
| TAR681 | GACCTTTGGCCTACGGCGACGTTTAAGAGCTAAGC | 44711847 | RNA1055- | 99.6 | 99.6 | 99.6 | 1690 |
| | TGGAAACAGCATAGCAAGTTTAAATAAGGCTAGTC | | 001 | | | | |
| | CGTTATCAACTTGAAAAAGTGGCACCGAGTCGGTG | | | | | | |
| | CTTTTTT | | | | | | |
| TAR630 | CGGAGCGAGAGAGCACAGCGGTTTAAGAGCTAAGC | 44711673 | RNA1022- | 99.6 | 99.7 | 99.65067 | 1691 |
| | TGGAAACAGCATAGCAAGTTTAAATAAGGCTAGTC | | 001 | | | | |
| | CGTTATCAACTTGAAAAAGTGGCACCGAGTCGGTG | | | | | | |
| | CTTTTTT | | | | | | |
| TAR744 | CTAGGACATGCGAACTTAGCGTTTAAGAGCTAAGC | 44712134 | RNA1019- | 99.6 | 99.9 | 99.75254 | 1692 |
| | TGGAAACAGCATAGCAAGTTTAAATAAGGCTAGTC | | 001 | | | | |
| | CGTTATCAACTTGAAAAAGTGGCACCGAGTCGGTG | | | | | | |
| | CTTTTTT | | | | | | |
| TAR617 | AGGGTAGGAGAGACTCACGCGTTTAAGAGCTAAGC | 44711608 | RNA114- | 99.6 | 99.9 | 99.75328 | 1693 |
| | TGGAAACAGCATAGCAAGTTTAAATAAGGCTAGTC | | 002 | | | | |
| | CGTTATCAACTTGAAAAAGTGGCACCGAGTCGGTG | | | | | | |
| | CTTTTTT | | | | | | |
| TAR717 | GTAGGCTCGTCCCAAAGGCGGTTTAAGAGCTAAGC | 44711990 | RNA134- | 99.7 | 99.8 | 99.75071 | 1694 |
| | TGGAAACAGCATAGCAAGTTTAAATAAGGCTAGTC | | 002 | | | | |
| | CGTTATCAACTTGAAAAAGTGGCACCGAGTCGGTG | | | | | | |
| | CTTTTTT | | | | | | |
| TAR636 | GCGGGCCACCAAGGAGAACTGTTTAAGAGCTAAGC | 44711709 | RNA122- | 99.7 | 99.8 | 99.75096 | 1695 |
| | TGGAAACAGCATAGCAAGTTTAAATAAGGCTAGTC | | 002 | | | | |
| | CGTTATCAACTTGAAAAAGTGGCACCGAGTCGGTG | | | | | | |
| | CTTTTTT | | | | | | |
| TAR753 | GTCTATGTGGGGCCACACCGGTTTAAGAGCTAAGC | 44712166 | RNA1038- | 99.7 | 99.7 | 99.7 | 1696 |
| | TGGAAACAGCATAGCAAGTTTAAATAAGGCTAGTC | | 001 | | | | |
| | CGTTATCAACTTGAAAAAGTGGCACCGAGTCGGTG | | | | | | |
| | CTTTTTT | | | | | | |
| TAR654 | TGGATCTCGGGGAAGCGGCGGTTTAAGAGCTAAGC | 44711751 | RNA1052- | 99.7 | 99.8 | 99.75073 | 1697 |
| | TGGAAACAGCATAGCAAGTTTAAATAAGGCTAGTC | | 001 | | | | |
| | CGTTATCAACTTGAAAAAGTGGCACCGAGTCGGTG | | | | | | |
| | CTTTTTT | | | | | | |
| TAR261 | AAGTGGAGGCGTCGCGCTGGGTTTAAGAGCTAAGC | 44711491 | RNA1053- | 99.7 | 99.9 | 99.8007 | 1698 |
| | TGGAAACAGCATAGCAAGTTTAAATAAGGCTAGTC | | 001 | | | | |
| | CGTTATCAACTTGAAAAAGTGGCACCGAGTCGGTG | | | | | | |
| | CTTTTTT | | | | | | |
| TAR743 | GAGAGCTGTGGACTTCGTCTGTTTAAGAGCTAAGC | 44712109 | RNA142- | 99.7 | 99.8 | 99.75099 | 1699 |
| | TGGAAACAGCATAGCAAGTTTAAATAAGGCTAGTC | | 002 | | | | |
| | CGTTATCAACTTGAAAAAGTGGCACCGAGTCGGTG | | | | | | |
| | CTTTTTT | | | | | | |
| TAR576 | GGCGCTCATTCTAGGACTTCGTTTAAGAGCTAAGC | 44711243 | RNA109- | 99.7 | 99.8 | 99.75063 | 1700 |
| | TGGAAACAGCATAGCAAGTTTAAATAAGGCTAGTC | | 002 | | | | |
| | CGTTATCAACTTGAAAAAGTGGCACCGAGTCGGTG | | | | | | |
| | CTTTTTT | | | | | | |
| TAR734 | GTCTGGGGGAGGCGTCGCCCGTTTAAGAGCTAAGC | 44712049 | RNA1012- | 99.7 | 99.6 | 99.6489 | 1701 |
| | TGGAAACAGCATAGCAAGTTTAAATAAGGCTAGTC | | 001 | | | | |
| | CGTTATCAACTTGAAAAAGTGGCACCGAGTCGGTG | | | | | | |
| | CTTTTTT | | | | | | |
| TAR715 | AGCTGGAGTGGGGGACGGGTGTTTAAGAGCTAAGC | 44711972 | RNA1023- | 99.7 | 99.9 | 99.80255 | 1702 |
| | TGGAAACAGCATAGCAAGTTTAAATAAGGCTAGTC | | 001 | | | | |
| | CGTTATCAACTTGAAAAAGTGGCACCGAGTCGGTG | | | | | | |
| | CTTTTTT | | | | | | |
| TAR737 | CCGGGTAAGCCTGTCTGCTGGTTTAAGAGCTAAGC | 44712067 | RNA1045- | 99.7 | 99.9 | 99.80222 | 1703 |
| | TGGAAACAGCATAGCAAGTTTAAATAAGGCTAGTC | | 001 | | | | |
| | CGTTATCAACTTGAAAAAGTGGCACCGAGTCGGTG | | | | | | |
| | CTTTTTT | | | | | | |
| TAR687 | CCTACGGCGACGGGAGGGTCGTTTAAGAGCTAAGC | 44711856 | RNA1026- | 99.7 | 99.8 | 99.75098 | 1704 |
| | TGGAAACAGCATAGCAAGTTTAAATAAGGCTAGTC | | 001 | | | | |
| | CGTTATCAACTTGAAAAAGTGGCACCGAGTCGGTG | | | | | | |
| | CTTTTTT | | | | | | |
| TAR745 | GCTAGGACATGCGAACTTAGGTTTAAGAGCTAAGC | 44712135 | RNA1044- | 99.7 | 99.9 | 99.80171 | 1705 |
| | TGGAAACAGCATAGCAAGTTTAAATAAGGCTAGTC | | 001 | | | | |
| | CGTTATCAACTTGAAAAAGTGGCACCGAGTCGGTG | | | | | | |
| | CTTTTTT | | | | | | |
| TAR684 | TTTGGCCTACGGCGACGGGAGTTTAAGAGCTAAGC | 44711851 | RNA130- | 99.7 | 99.8 | 99.75061 | 1706 |
| | TGGAAACAGCATAGCAAGTTTAAATAAGGCTAGTC | | 002 | | | | |
| | CGTTATCAACTTGAAAAAGTGGCACCGAGTCGGTG | | | | | | |
| | CTTTTTT | | | | | | |
| TAR706 | TCCCCCAGCGCAGCTGGAGTGTTTAAGAGCTAAGC | 44711961 | RNA133- | 99.7 | 99.7 | 99.7 | 1707 |
| | TGGAAACAGCATAGCAAGTTTAAATAAGGCTAGTC | | 002 | | | | |
| | CGTTATCAACTTGAAAAAGTGGCACCGAGTCGGTG | | | | | | |
| | CTTTTTT | | | | | | |
| TAR669 | CGCGCGCTACTTGCCCCTTTGTTTAAGAGCTAAGC | 44711810 | RNA129- | 99.7 | 99.7 | 99.7 | 1708 |
| | TGGAAACAGCATAGCAAGTTTAAATAAGGCTAGTC | | 002 | | | | |
| | CGTTATCAACTTGAAAAAGTGGCACCGAGTCGGTG | | | | | | |
| | CTTTTTT | | | | | | |
| TAR666 | GGGGAAGGGGGTGCGCACCCGTTTAAGAGCTAAGC | 44711786 | RNA1020- | 99.7 | 99.8 | 99.75052 | 1709 |
| | TGGAAACAGCATAGCAAGTTTAAATAAGGCTAGTC | | 001 | | | | |
| | CGTTATCAACTTGAAAAAGTGGCACCGAGTCGGTG | | | | | | |
| | CTTTTTT | | | | | | |
| TAR596 | AAGAAAAGGAAACTGAAAACGTTTAAGAGCTAAGC | 44711370 | RNA1030- | 99.7 | 99.8 | 99.75048 | 1710 |
| | TGGAAACAGCATAGCAAGTTTAAATAAGGCTAGTC | | 001 | | | | |
| | CGTTATCAACTTGAAAAAGTGGCACCGAGTCGGTG | | | | | | |
| | CTTTTTT | | | | | | |
| TAR723 | GAGGTTTGTGAACGCGTGGAGTTTAAGAGCTAAGC | 44712017 | RNA1048- | 99.8 | 99.8 | 99.8 | 1711 |
| | TGGAAACAGCATAGCAAGTTTAAATAAGGCTAGTC | | 001 | | | | |
| | CGTTATCAACTTGAAAAAGTGGCACCGAGTCGGTG | | | | | | |
| | CTTTTTT | | | | | | |
| TAR747 | TCGCATGTCCTAGCACCTCTGTTTAAGAGCTAAGC | 44712144 | RNA1034- | 99.8 | 99.7 | 99.74919 | 1712 |
| | TGGAAACAGCATAGCAAGTTTAAATAAGGCTAGTC | | 001 | | | | |
| | CGTTATCAACTTGAAAAAGTGGCACCGAGTCGGTG | | | | | | |
| | CTTTTTT | | | | | | |
| TAR624 | CTCCCGCTCTGCACCCTCTGGTTTAAGAGCTAAGC | 44711649 | RNA1035- | 99.8 | 99.9 | 99.85092 | 1713 |
| | TGGAAACAGCATAGCAAGTTTAAATAAGGCTAGTC | | 001 | | | | |
| | CGTTATCAACTTGAAAAAGTGGCACCGAGTCGGTG | | | | | | |
| | CTTTTTT | | | | | | |
| TAR646 | CCGTGGGGCTAGTCCAGGGCGTTTAAGAGCTAAGC | 44711731 | RNA125- | 99.8 | 99.8 | 99.8 | 1714 |
| | TGGAAACAGCATAGCAAGTTTAAATAAGGCTAGTC | | 002 | | | | |
| | CGTTATCAACTTGAAAAAGTGGCACCGAGTCGGTG | | | | | | |
| | CTTTTTT | | | | | | |
| TAR618 | TCTCTCCTACCCTCCCGCTCGTTTAAGAGCTAAGC | 44711618 | RNA1031- | 99.8 | 99.9 | 99.8505 | 1715 |
| | TGGAAACAGCATAGCAAGTTTAAATAAGGCTAGTC | | 001 | | | | |
| | CGTTATCAACTTGAAAAAGTGGCACCGAGTCGGTG | | | | | | |
| | CTTTTTT | | | | | | |
| TAR738 | GAAGCAGAGCCGCAGCAGACGTTTAAGAGCTAAGC | \|44712076 | RNA137- | 99.8 | 99.9 | 99.8501 | 1716 |
| | TGGAAACAGCATAGCAAGTTTAAATAAGGCTAGTC | | 001 | | | | |
| | CGTTATCAACTTGAAAAAGTGGCACCGAGTCGGTG | | | | | | |
| | CTTTTTT | | | | | | |
| TAR639 | CTCCTTGGTGGCCCGCCGTGGTTTAAGAGCTAAGC | 44711716 | RNA1047- | 99.8 | 99.1 | 99.44179 | 1717 |
| | TGGAAACAGCATAGCAAGTTTAAATAAGGCTAGTC | | 001 | | | | |
| | CGTTATCAACTTGAAAAAGTGGCACCGAGTCGGTG | | | | | | |
| | CTTTTTT | | | | | | |
| TAR688 | GGAGGGTCGGGACAAAGTTTGTTTAAGAGCTAAGC | 44711868 | RNA131- | 99.8 | 99.8 | 99.8 | 1718 |
| | TGGAAACAGCATAGCAAGTTTAAATAAGGCTAGTC | | 002 | | | | |
| | CGTTATCAACTTGAAAAAGTGGCACCGAGTCGGTG | | | | | | |
| | CTTTTTT | | | | | | |
| TAR697 | GAGAAACCCTCCCCCAACCTGTTTAAGAGCTAAGC | 44711912 | RNA1027- | 99.8 | 99.9 | 99.85116 | 1719 |
| | TGGAAACAGCATAGCAAGTTTAAATAAGGCTAGTC | | 001 | | | | |
| | CGTTATCAACTTGAAAAAGTGGCACCGAGTCGGTG | | | | | | |
| | CTTTTTT | | | | | | |
| TAR708 | CCCCCAGCGCAGCTGGAGTGGTTTAAGAGCTAAGC | 44711962 | RNA1032- | 99.8 | 99.9 | 99.85093 | 1720 |
| | TGGAAACAGCATAGCAAGTTTAAATAAGGCTAGTC | | 001 | | | | |
| | CGTTATCAACTTGAAAAAGTGGCACCGAGTCGGTG | | | | | | |
| | CTTTTTT | | | | | | |
| TAR653 | CTGGATCTCGGGGAAGCGGCGTTTAAGAGCTAAGC | 44711750 | RNA1046- | 99.8 | 99.9 | 99.8511 | 1721 |
| | TGGAAACAGCATAGCAAGTTTAAATAAGGCTAGTC | | 001 | | | | |
| | CGTTATCAACTTGAAAAAGTGGCACCGAGTCGGTG | | | | | | |
| | CTTTTTT | | | | | | |
| TAR724 | AGGTTTGTGAACGCGTGGAGGTTTAAGAGCTAAGC | 44712018 | RNA1050- | 99.8 | 99.5 | 99.64705 | 1722 |
| | TGGAAACAGCATAGCAAGTTTAAATAAGGCTAGTC | | 001 | | | | |
| | CGTTATCAACTTGAAAAAGTGGCACCGAGTCGGTG | | | | | | |
| | CTTTTTT | | | | | | |
| TAR755 | CTATGTGGGGCCACACCGTGGTTTAAGAGCTAAGC | 44712168 | RNA1056- | 99.8 | 99.9 | 99.85084 | 1723 |
| | TGGAAACAGCATAGCAAGTTTAAATAAGGCTAGTC | | 001 | | | | |
| | CGTTATCAACTTGAAAAAGTGGCACCGAGTCGGTG | | | | | | |
| | CTTTTTT | | | | | | |
| TAR647 | GCTAGTCCAGGGCTGGATCTGTTTAAGAGCTAAGC | 44711738 | RNA1018- | 99.8 | 99.4 | 99.59755 | 1724 |
| | TGGAAACAGCATAGCAAGTTTAAATAAGGCTAGTC | | 001 | | | | |
| | CGTTATCAACTTGAAAAAGTGGCACCGAGTCGGTG | | | | | | |
| | CTTTTTT | | | | | | |
| TAR754 | TCTATGTGGGGCCACACCGTGTTTAAGAGCTAAGC | 44712167 | RNA143- | 99.9 | 99.9 | 99.9 | 1725 |
| | TGGAAACAGCATAGCAAGTTTAAATAAGGCTAGTC | | 002 | | | | |
| | CGTTATCAACTTGAAAAAGTGGCACCGAGTCGGTG | | | | | | |
| | CTTTTTT | | | | | | |
| N/A | N/A | N/A | no gRNA | 99.9 | 100 | 99.91388 | |
| TAR663 | GTGGCCTGGGAGTGGGGAAGGTTTAAGAGCTAAGC | 44711773 | RNA1037- | 99.9 | 99.8 | 99.84919 | 1726 |
| | TGGAAACAGCATAGCAAGTTTAAATAAGGCTAGTC | | 001 | | | | |
| | CGTTATCAACTTGAAAAAGTGGCACCGAGTCGGTG | | | | | | |
| | CTTTTTT | | | | | | |
| TAR268 | GCACCCCCTTCCCCACTCCCGTTTAAGAGCTAAGC | 44711777 | RNA1041- | 99.9 | 99.9 | 99.9 | 1727 |
| | TGGAAACAGCATAGCAAGTTTAAATAAGGCTAGTC | | 001 | | | | |
| | CGTTATCAACTTGAAAAAGTGGCACCGAGTCGGTG | | | | | | |
| | CTTTTTT | | | | | | |
| TAR614 | GGCCGAGATGTCTCGCTCCGGTTTAAGAGCTAAGC | 44711539 | RNA1051- | 99.9 | 99.7 | 99.79869 | 1728 |
| | TGGAAACAGCATAGCAAGTTTAAATAAGGCTAGTC | | 001 | | | | |
| | CGTTATCAACTTGAAAAAGTGGCACCGAGTCGGTG | | | | | | |
| | CTTTTTT | | | | | | |
| TAR716 | GACGGGTAGGCTCGTCCCAAGTTTAAGAGCTAAGC | 44711985 | RNA1057- | 99.9 | 99.8 | 99.84901 | 1729 |
| | TGGAAACAGCATAGCAAGTTTAAATAAGGCTAGTC | | 001 | | | | |
| | CGTTATCAACTTGAAAAAGTGGCACCGAGTCGGTG | | | | | | |
| | CTTTTTT | | | | | | |
| TAR637 | TTCTCCTTGGTGGCCCGCCGGTTTAAGAGCTAAGC | 44711714 | RNA1011- | 99.9 | 99.8 | 99.84947 | 1730 |
| | TGGAAACAGCATAGCAAGTTTAAATAAGGCTAGTC | | 001 | | | | |
| | CGTTATCAACTTGAAAAAGTGGCACCGAGTCGGTG | | | | | | |
| | CTTTTTT | | | | | | |
| TAR652 | GCTGGATCTCGGGGAAGCGGGTTTAAGAGCTAAGC | 44711749 | RNA126- | 99.9 | 99.8 | 99.8492 | 1731 |
| | TGGAAACAGCATAGCAAGTTTAAATAAGGCTAGTC | | 002 | | | | |
| | CGTTATCAACTTGAAAAAGTGGCACCGAGTCGGTG | | | | | | |
| | CTTTTTT | | | | | | |
| TAR667 | GGGCAAGTAGCGCGCGTCCCGTTTAAGAGCTAAGC | 44711803 | RNA1042- | 99.9 | 99.5 | 99.69622 | 1732 |
| | TGGAAACAGCATAGCAAGTTTAAATAAGGCTAGTC | | 001 | | | | |
| | CGTTATCAACTTGAAAAAGTGGCACCGAGTCGGTG | | | | | | |
| | CTTTTTT | | | | | | |
| TAR180 | ACTCTCTCTTTCTGGCCTGGGTTTAAGAGCTAAGC | 44711582 | RNA1049- | 99.9 | 99.8 | 99.84899 | 1733 |
| | TGGAAACAGCATAGCAAGTTTAAATAAGGCTAGTC | | 001 | | | | |
| | CGTTATCAACTTGAAAAAGTGGCACCGAGTCGGTG | | | | | | |
| | CTTTTTT | | | | | | |
| TAR731 | GAGGGGCGCTTGGGGTCTGGGTTTAAGAGCTAAGC | 44712035 | RNA135- | 99.9 | 99.9 | 99.9 | 1734 |
| | TGGAAACAGCATAGCAAGTTTAAATAAGGCTAGTC | | 002 | | | | |
| | CGTTATCAACTTGAAAAAGTGGCACCGAGTCGGTG | | | | | | |
| | CTTTTTT | | | | | | |

### Example 12: B2M Dual-Guide Screening

[0296] To improve silencing robustness and durability, assays using administration of two guides to the same cells were undertaken. This Example describes a study in which the gRNA pairs are subject to screening in human primary T cells.

[0297] T cells were isolated from human leukapheresis product (StemCell Technologies, Cat. No. 70500) using the EasySep™ Human T cell Isolation Kit (StemCell Technologies, Cat. No. 17951). T cells were thawed and activated. Prior to nucleofection, T cells were thawed, washed, and stimulated using Dynabeads Human T-Activator CD3/CD28 for T Cell Expansion and Activation (Thermo Fisher, Cat. No. 11131D) at a 3:1 bead-to-cell number ratio for approximately 48 hours at 37° C. with 5% CO₂ in complete T cell medium (X-VIVO15 media; Lonza, Cat. No. BEBP04-744Q) supplemented with 5% Human AB serum (Gemini Bio-Product, Cat. No. 100-512), 2 mM L-alanyl-L-glutamine, 5 ng/ml IL-7 and 5 ng/ml IL-15. Beads were then magnetically removed from the culture and T cells were cultured in fresh complete T cell medium for approximately 24 hours. T cells were then nucleofected with 2.5 μg CRISPR-off mRNA (TriLink) plus 2.5 μg sgRNA (IDT) at 2E5 cells/well using the P3 Primary Cell 96-well Nucleofector Kit (Lonza, Cat. No. V4SP-3960) and the Amaxa 4D nucleofector (Lonza) with pulse code EO115.

[0298] After nucleofection, T cells were resuspended in complete T cell medium and maintained by replacement of media and passages as necessary twice weekly. Cells were restimulated with ImmunoCult™ Human CD3/CD28 T Cell Activator (StemCell Technologies, Cat. No. 10991) on day 13 post-nucleofection.

[0299] Cell surface β2M protein expression on live T cells was assessed by flow cytometry at days 6, 13, and 20 post-nucleofection. No mRNA, CRISPR-off mRNA plus non-B2M targeting sgRNA, CRISPR-off mRNA with no gRNA, WT Cas9 mRNA plus exon-targeting sgRNA, stain only (no mRNA or gRNA), isotype (no mRNA or gRNA), and no-stain (no mRNA or gRNA) controls are also run on each screening plate.

[0300] β2M flow cytometry assay was performed as described in Example 5. The gating strategy is shown in FIG. 2A (no gRNA) and FIG. 2B (RNA102 & RNA964). Test samples were compared to negative (CRISPR-off mRNA with no sgRNA) control expression levels to assess % silencing. Results are shown in FIG. 2C.

[0301] FIGS. 3A-3B show the percentage of B2M+ positive cells observed after administration of various pairs of guide RNAs, as well as the distance from the guide RNA binding site to the B2M TSS. FIG. 4 B2M silencing by 6 guide RNA pairs as measured on day 6, day 13, and day 20. All 6 guide RNA pairs reduced B2M expression at each timepoint compared to a no gRNA control.

### Example 13: B2M CpG Methylation Patterns

[0302] The CpG methylation patterns in primary human T cells treated with CRISPR-off were investigated. Hybrid capture assay was performed on bisulfite treated DNA to investigate methylation patterns at CpG sites that were induced by CRISPR-off at the 1 kb region around the B2M TSS.

[0303] B2M was silenced with two sets of double guide combinations (RNA138/949 and RNA104/988). Samples were sorted on day 14 post-nucleofection; pure B2M negative (B2M−) and B2M positive (B2M+) cell populations were sent for methylation analysis. More than 99% of the sorted B2M+ cells were positive for B2M and less than 1% of B2M− cells were positive for B2M. After sorting, B2M− samples were then either restimulated with PMA/ionomycin or left in standard media; after incubating these samples to observe silencing, restimulated and control samples were also sent for hybrid capture methylation analysis.

[0304] The outline of the experimental procedure for each sample is shown in FIG. 6A. FIG. 6B shows methylation patterns for each condition around the B2M locus. As shown in FIG. 7A-7B, robust B2M CpG methylation was observed in the sorted B2M-negative populations. As shown in FIG. 8, broad B2M CpG methylation was achieved with the combination of RNA138/949 and RNA104/988.

### Example 14: B2M Silencing Under Both Fresh and Frozen and Multiple Effector/Guide Conditions

[0305] Fresh primary human T cells were transfected with various combinations of effectors (FP13 or FP11a) and/or RNAs (Guide 1, Guide2, Milan TRACR, or US TRACR), or with WT Cas9 (FIG. 9A). Six days after transfection, the percent of T cells expressed B2M was measured. Silencing was achieved when effectors and guides were combined, but not when an effector or guide was used on its own. B2M expression in transfected T cells was also measured at day 14 post-transfection (FIG. 9B). Silencing was retained over time when effectors and guides were combined.

[0306] The same transfection was repeated in primary human T cells that were previously frozen (FIG. 10A). Again, silencing was achieved when effectors and guides were combined. Comparison of B2M silencing in primary human T cells from two different donors (DON23, FIG. 10B and DON24, FIG. 10C) six days after transfection was also done (transfections done as above). The effectiveness of B2M silencing when effectors and guides were combined differed between donors, with DON24 (FIG. 10C) exhibiting more robust B2M silencing with all effector/guide combinations. Transfections were performed with the Fusion Protein 13 and Fusion Protein 11a and gRNAs, WT Cas9, or no gRNA controls, and B2M expression was assess at days 6, 12, 20, 28, and 35 post-transfection. Silencing was achieved when effectors and guides were combined, and previously frozen T cells retained greater B2M silencing over time.

### Example 15: B2M Silencing Under Multiple Serum Concentration

[0307] B2M silencing in primary human T cells under different serum conditions (5% versus 10% human serum) was measured over time following transfection with B2M-silencing gRNAs, WT Cas9, or no gRNA controls. An exemplary gating strategy for B2M expression measurement is shown in FIG. 11A. There was no difference in B2M silencing in the different media conditions at any timepoint following transfection (FIG. 11B).

### Example 16: B2M Silencing Under Multi-Target Multiplex Conditions Under Multiple Transduction Timing

[0308] Transducing chimeric antigen receptors (CARs) into T cells that have been treated with silencing gRNAs may affect the gRNA silencing efficacy, the expression of the CAR, or both. To determine whether that was the case for the gRNAs described above, primary human T cells from donors DON001, DON006, DON020, DON023 were nucleofected at either day 2 or day 3 post-thaw. T cells were also transduced with a B-cell maturation antigen (BCMA) CAR at day 1, 2, or 3 post-thaw. T cells were transfected with pairs made from 6 different gRNAs in combination with 2.5 μg of Fusion Protein 11a. Nucleofection with gRNAs on day 3 post-thaw resulted in more robust B2M silencing when combined with BCMA CAR transduction, as illustrated by a reduction in B2M, HLA-DR, and CD3 expression. Additionally, B2M, HLA-DR, and CD3 expression remained lower when BCMA CAR was transduced on day 1 or day 2 post-thaw as compared to day 3. Different pairs of gRNAs exhibited varied B2M silencing ability (FIG. 12A).

[0309] The transduction efficiency of the BCMA CAR differed by day of transduction. Transducing T cells with BMCA CAR at day 1 or day 3 post-thaw resulted in greater CAR expression than transduction on day 2 post-thaw (FIG. 12B). Although B2M silencing with gRNAs was more effective in CAR-cells, as measured by B2M, HLA-DR, and CD3 expression, B2M silencing was effective in CAR+ cells as well (FIG. 12C), indicating that B2M-silenced human T cells an also express transduced CARs.

### Example 17: B2M Silencing with Multiple Manufacture Batches of gRNA

[0310] To determine whether inter-nucleofection variability was a result of gRNA quality, primary human T cells from donors DON006 and DON023, were transfected with different batches of gRNAs. Three batches of two B2M-silencing gRNAs were tested in a pairwise fashion, in combination with 2.5 μg of the effector Fusion Protein 11a. An exemplary gating strategy of nucleofected T cells is shown in FIG. 13A. While all pairs of gRNAs resulted in marked silencing of B2M expression, there was some slight batch-depending variability in the silencing efficiency of gRNAs at 7 days post-nucleofection (FIG. 13B).

### Example 18: B2M Dual Guide Dose Response Assay

[0311] The dose response of twelve guide pairs was assayed at two points. 2.5 micrograms of Fusion Protein 11a was used, as well as a starting dose of 2.5 micrograms of each sgRNA. Response was observed on days 6 (FIG. 14A) and 13 (FIG. 14B).

### Example 19: Allogeneic Functional Assays in Primary T Cells

[0312] The response of allogeneic healthy donor CD8+ T cells to mock-modified or B2M-silenced T cells was assessed via a mixed lymphocyte co-culture assay.

[0313] Allogeneic healthy donor CD8⁺ T cell proliferation and/or activation, as measured by flow cytometry for cell dye dilution and cell surface expression of activation markers, respectively, were assessed after co-culture with T cells that were mock-modified or B2M-silenced. A reduction of the response of allogeneic T cells to B2M-silenced cells, resulting in less CD8+ and CD4⁺ T cell proliferation, measured by CellTrace Violet dilution over a 7 day assay, and activation, measured by cell surface staining for CD25 expression, was observed relative to the response to unmodified cells. Results are shown in FIGS. 15A-15B.

[0314] T cells were isolated from human leukapheresis product (StemCell Technologies, Cat. No. 70500) using the EasySep™ Human T cell Isolation Kit (StemCell Technologies, Cat. No. 17951) and cryopreserved in CryoStor® CS10 Freeze Media (Biolife Solutions, Cat. No. 210502) Prior to nucleofection, T cells were thawed, washed, and stimulated using Dynabeads Human T-Activator CD3/CD28 for T Cell Expansion and Activation (Thermo Fisher, Cat. No. 11131D) at a 1:1 bead-to-cell number ratio for approximately 72 hours at 37° C. with 5% CO₂ in complete T cell medium (ImmunoCult™-XF T Cell Expansion Medium; StemCell Technologies, Cat. No. 10981) supplemented with 5% Human AB serum, heat inactivated (Gemini Bio-Product, Cat. No. 100-512), 2 mM L-alanyl-L-glutamine, 5 ng/mL IL-7 and 5 ng/ml IL-15. Beads were then magnetically removed from the culture and T cells are then nucleofected with 2.5 μg CRISPR-Off mRNA plus 2.5 μg sgRNA (IDT) at 2E5 cells/well using the P3 Primary Cell 96-well Nucleofector Kit (Lonza, Cat. No. V4SP-3960) and the Amaxa 4D nucleofector (Lonza) with pulse code EO115.

[0315] After nucleofection, T cells were resuspended in complete T cell medium and maintained by replacement of media and passages as necessary twice weekly. At day 8 post-nucleofection, B2M-silenced cells were sorted and culture resumed until the day of assay. On the day of assay, unedited and B2M-silenced T cells were treated with 50 μg/ml of mitomycin C for 30 min at 37C, then washed, followed by staining with 0.5 μM CFSE in PBS for 3 min at room temperature, then washed. Allogeneic PBMC were thawed and dyed with CellTrace Violet (CTV) by incubation in 10 mM CTV in PBS for 10 min at 37C, then washed. T cells and PBMC were coincubated at a 1:1 T cell:PBMC ratio in T cell media without cytokine addition for 7 days. At the assay endpoint, cell surface expression of CD3, CD4, CD8, and CD25 was assessed by flow cytometry of the co-culture samples. Proliferation of CD8+ and CD4+ T cells within the allogeneic PBMC was assessed by analyzing CFSE− CD3+CD8+ or CFSE−CD3+CD4+ cell populations and quantifying the frequency of CTV-dilution. Activation of CD8+ and CD4⁺ T cells within the allogeneic PBMC was assessed by analyzing CFSE− CD3+CD8+ or CFSE-CD3+CD4+ cell populations and quantifying frequency of CD25 cell surface expression.

### Example 27: B2M Triple-Guide Screening

[0316] To improve silencing robustness and durability, assays using administration of three guides to the same cells were undertaken. This Example describes a study in which the gRNA triples are subject to screening in human primary T cells (FIG. 16A-C).

[0317] T cells were isolated from human leukapheresis product (StemCell Technologies, Cat. No. 70500) using the EasySep™ Human T cell Isolation Kit (StemCell Technologies, Cat. No. 17951). T cells are thawed and activated. Prior to nucleofection, T cells were thawed, washed, and stimulated using Dynabeads Human T-Activator CD3/CD28 for T Cell Expansion and Activation (Thermo Fisher, Cat. No. 11131D) at a 3:1 bead-to-cell number ratio for approximately 48 hours at 37° C. with 5% CO₂ in complete T cell medium (X-VIVO15 media; Lonza, Cat. No. BEBP04-744Q) supplemented with 5% Human AB serum (Gemini Bio-Product, Cat. No. 100-512), 2 mM L-alanyl-L-glutamine, 5 ng/ml IL-7 and 5 ng/ml IL-15. Beads were then magnetically removed from the culture and T cells are cultured in fresh complete T cell medium for approximately 24 hours. T cells were then nucleofected with 2.5 μg CRISPR-off mRNA (TriLink) plus a total of 2.5 μg sgRNA (IDT) (divided amongst either two or three guides) at 2E5 cells/well using the P3 Primary Cell 96-well Nucleofector Kit (Lonza, Cat. No. V4SP-3960) and the Amaxa 4D nucleofector (Lonza) with pulse code EO115.

[0318] After nucleofection, T cells were resuspended in complete T cell medium and maintained by replacement of media and passages as necessary twice weekly. Cells were restimulated with ImmunoCult™ Human CD3/CD28 T Cell Activator (StemCell Technologies, Cat. No. 10991) on day 13 post-nucleofection.

[0319] Cell surface β2M protein expression on live T cells was assessed by flow cytometry at days 6, 13, and 20 post-nucleofection. No mRNA, CRISPR-off mRNA plus non-B2M targeting sgRNA, CRISPR-off mRNA with no gRNA, WT Cas9 mRNA plus exon-targeting sgRNA, stain only (no mRNA or gRNA), isotype (no mRNA or gRNA), and no-stain (no mRNA or gRNA) controls were also run on each screening plate.

[0320] β2M flow cytometry assay was performed as described in Example 5. Test samples were compared to negative (CRISPR-off mRNA with no sgRNA) control expression levels to assess % silencing. Results are shown in FIG. 16A-16B.

### SEQUENCES

[0321] The SEQ ID NOs (SEQ) of nucleotide (nt) and amino acid (aa) sequences described in the present disclosure are listed below.

| SEQ | Description | Sequence |
|---|---|---|
| 1 | S. pyogenes WT | ATGGATAAGAAATACTCAATAGGCTTAGATATCGGCA |
| | Cas9 Sequence | CAAATAGCGTCGGATGGGCGGTGATCACTGATGAATA |
| | (nt) | TAAGGTTCCGTCTAAAAAGTTCAAGGTTCTGGGAAAT |
| | | ACAGACCGCCACAGTATCAAAAAAAATCTTATAGGGG |
| | | CTCTTTTATTTGACAGTGGAGAGACAGCGGAAGCGAC |
| | | TCGTCTCAAACGGACAGCTCGTAGAAGGTATACACGT |
| | | CGGAAGAATCGTATTTGTTATCTACAGGAGATTTTTTC |
| | | AAATGAGATGGCGAAAGTAGATGATAGTTTCTTTCAT |
| | | CGACTTGAAGAGTCTTTTTTGGTGGAAGAAGACAAGA |
| | | AGCATGAACGTCATCCTATTTTTGGAAATATAGTAGAT |
| | | GAAGTTGCTTATCATGAGAAATATCCAACTATCTATCA |
| | | TCTGCGAAAAAAATTGGTAGATTCTACTGATAAAGCG |
| | | GATTTGCGCTTAATCTATTTGGCCTTAGCGCATATGAT |
| | | TAAGTTTCGTGGTCATTTTTTGATTGAGGGAGATTTAA |
| | | ATCCTGATAATAGTGATGTGGACAAACTATTTATCCA |
| | | GTTGGTACAAACCTACAATCAATTATTTGAAGAAAAC |
| | | CCTATTAACGCAAGTGGAGTAGATGCTAAAGCGATTC |
| | | TTTCTGCACGATTGAGTAAATCAAGACGATTAGAAAA |
| | | TCTCATTGCTCAGCTCCCCGGTGAGAAGAAAAATGGC |
| | | TTATTTGGGAATCTCATTGCTTTGTCATTGGGTTTGAC |
| | | CCCTAATTTTAAATCAAATTTTGATTTGGCAGAAGATG |
| | | CTAAATTACAGCTTTCAAAAGATACTTACGATGATGA |
| | | TTTAGATAATTTATTGGCGCAAATTGGAGATCAATATG |
| | | CTGATTTGTTTTTGGCAGCTAAGAATTTATCAGATGCT |
| | | ATTTTACTTTCAGATATCCTAAGAGTAAATACTGAAAT |
| | | AACTAAGGCTCCCCTATCAGCTTCAATGATTAAACGCT |
| | | ACGATGAACATCATCAAGACTTGACTCTTTTAAAAGC |
| | | TTTAGTTCGACAACAACTTCCAGAAAAGTATAAAGAA |
| | | ATCTTTTTTGATCAATCAAAAAACGGATATGCAGGTTA |
| | | TATTGATGGGGGAGCTAGCCAAGAAGAATTTTATAAA |
| | | TTTATCAAACCAATTTTAGAAAAAATGGATGGTACTG |
| | | AGGAATTATTGGTGAAACTAAATCGTGAAGATTTGCT |
| | | GCGCAAGCAACGGACCTTTGACAACGGCTCTATTCCC |
| | | CATCAAATTCACTTGGGTGAGCTGCATGCTATTTTGAG |
| | | AAGACAAGAAGACTTTTATCCATTTTTAAAAGACAAT |
| | | CGTGAGAAGATTGAAAAAATCTTGACTTTTCGAATTC |
| | | CTTATTATGTTGGTCCATTGGCGCGTGGCAATAGTCGT |
| | | TTTGCATGGATGACTCGGAAGTCTGAAGAAACAATTA |
| | | CCCCATGGAATTTTGAAGAAGTTGTCGATAAAGGTGC |
| | | TTCAGCTCAATCATTTATTGAACGCATGACAAACTTTG |
| | | ATAAAAATCTTCCAAATGAAAAAGTACTACCAAAACA |
| | | TAGTTTGCTTTATGAGTATTTTACGGTTTATAACGAAT |
| | | TGACAAAGGTCAAATATGTTACTGAAGGAATGCGAAA |
| | | ACCAGCATTTCTTTCAGGTGAACAGAAGAAAGCCATT |
| | | GTTGATTTACTCTTCAAAACAAATCGAAAAGTAACCG |
| | | TTAAGCAATTAAAAGAAGATTATTTCAAAAAAATAGA |
| | | ATGTTTTGATAGTGTTGAAATTTCAGGAGTTGAAGATA |
| | | GATTTAATGCTTCATTAGGTACCTACCATGATTTGCTA |
| | | AAAATTATTAAAGATAAAGATTTTTTGGATAATGAAG |
| | | AAAATGAAGATATCTTAGAGGATATTGTTTTAACATT |
| | | GACCTTATTTGAAGATAGGGAGATGATTGAGGAAAGA |
| | | CTTAAAACATATGCTCACCTCTTTGATGATAAGGTGAT |
| | | GAAACAGCTTAAACGTCGCCGTTATACTGGTTGGGGA |
| | | CGTTTGTCTCGAAAATTGATTAATGGTATTAGGGATAA |
| | | GCAATCTGGCAAAACAATATTAGATTTTTTGAAATCA |
| | | GATGGTTTTGCCAATCGCAATTTTATGCAGCTGATCCA |
| | | TGATGATAGTTTGACATTTAAAGAAGACATTCAAAAA |
| | | GCACAAGTGTCTGGACAAGGCGATAGTTTACATGAAC |
| | | ATATTGCAAATTTAGCTGGTAGCCCTGCTATTAAAAA |
| | | AGGTATTTTACAGACTGTAAAAGTTGTTGATGAATTG |
| | | GTCAAAGTAATGGGGCGGCATAAGCCAGAAAATATCG |
| | | TTATTGAAATGGCACGTGAAAATCAGACAACTCAAAA |
| | | GGGCCAGAAAAATTCGCGAGAGCGTATGAAACGAAT |
| | | CGAAGAAGGTATCAAAGAATTAGGAAGTCAGATTCTT |
| | | AAAGAGCATCCTGTTGAAAATACTCAATTGCAAAATG |
| | | AAAAGCTCTATCTCTATTATCTCCAAAATGGAAGAGA |
| | | CATGTATGTGGACCAAGAATTAGATATTAATCGTTTA |
| | | AGTGATTATGATGTCGATCACATTGTTCCACAAAGTTT |
| | | CCTTAAAGACGATTCAATAGACAATAAGGTCTTAACG |
| | | CGTTCTGATAAAAATCGTGGTAAATCGGATAACGTTC |
| | | CAAGTGAAGAAGTAGTCAAAAAGATGAAAAACTATT |
| | | GGAGACAACTTCTAAACGCCAAGTTAATCACTCAACG |
| | | TAAGTTTGATAATTTAACGAAAGCTGAACGTGGAGGT |
| | | TTGAGTGAACTTGATAAAGCTGGTTTTATCAAACGCC |
| | | AATTGGTTGAAACTCGCCAAATCACTAAGCATGTGGC |
| | | ACAAATTTTGGATAGTCGCATGAATACTAAATACGAT |
| | | GAAAATGATAAACTTATTCGAGAGGTTAAAGTGATTA |
| | | CCTTAAAATCTAAATTAGTTTCTGACTTCCGAAAAGAT |
| | | TTCCAATTCTATAAAGTACGTGAGATTAACAATTACCA |
| | | TCATGCCCATGATGCGTATCTAAATGCCGTCGTTGGAA |
| | | CTGCTTTGATTAAGAAATATCCAAAACTTGAATCGGA |
| | | GTTTGTCTATGGTGATTATAAAGTTTATGATGTTCGTA |
| | | AAATGATTGCTAAGTCTGAGCAAGAAATAGGCAAAGC |
| | | AACCGCAAAATATTTCTTTTACTCTAATATCATGAACT |
| | | TCTTCAAAACAGAAATTACACTTGCAAATGGAGAGAT |
| | | TCGCAAACGCCCTCTAATCGAAACTAATGGGGAAACT |
| | | GGAGAAATTGTCTGGGATAAAGGGCGAGATTTTGCCA |
| | | CAGTGCGCAAAGTATTGTCCATGCCCCAAGTCAATAT |
| | | TGTCAAGAAAACAGAAGTACAGACAGGCGGATTCTCC |
| | | AAGGAGTCAATTTTACCAAAAAGAAATTCGGACAAGC |
| | | TTATTGCTCGTAAAAAAGACTGGGATCCAAAAAAATA |
| | | TGGTGGTTTTGATAGTCCAACGGTAGCTTATTCAGTCC |
| | | TAGTGGTTGCTAAGGTGGAAAAAGGGAAATCGAAGA |
| | | AGTTAAAATCCGTTAAAGAGTTACTAGGGATCACAAT |
| | | TATGGAAAGAAGTTCCTTTGAAAAAAATCCGATTGAC |
| | | TTTTTAGAAGCTAAAGGATATAAGGAAGTTAAAAAAG |
| | | ACTTAATCATTAAACTACCTAAATATAGTCTTTTTGAG |
| | | TTAGAAAACGGTCGTAAACGGATGCTGGCTAGTGCCG |
| | | GAGAATTACAAAAAGGAAATGAGCTGGCTCTGCCAAG |
| | | CAAATATGTGAATTTTTTATATTTAGCTAGTCATTATG |
| | | AAAAGTTGAAGGGTAGTCCAGAAGATAACGAACAAA |
| | | AACAATTGTTTGTGGAGCAGCATAAGCATTATTTAGA |
| | | TGAGATTATTGAGCAAATCAGTGAATTTTCTAAGCGT |
| | | GTTATTTTAGCAGATGCCAATTTAGATAAAGTTCTTAG |
| | | TGCATATAACAAACATAGAGACAAACCAATACGTGAA |
| | | CAAGCAGAAAATATTATTCATTTATTTACGTTGACGAA |
| | | TCTTGGAGCTCCCGCTGCTTTTAAATATTTTGATACAA |
| | | CAATTGATCGTAAACGATATACGTCTACAAAAGAAGT |
| | | TTTAGATGCCACTCTTATCCATCAATCCATCACTGGTC |
| | | TTTATGAAACACGCATTGATTTGAGTCAGCTAGGAGG |
| | | TGACTGA |
| 2 | S. pyogenes WT | MDKKYSIGLDIGTNSVGWAVITDEYKVPSKKFKVLGNT |
| | Cas9 Sequence | DRHSIKKNLIGALLFDSGETAEATRLKRTARRRYTRRKN |
| | (aa) | RICYLQEIFSNEMAKVDDSFFHRLEESFLVEEDKKHERHP |
| | | IFGNIVDEVAYHEKYPTIYHLRKKLVDSTDKADLRLIYLA |
| | | LAHMIKFRGHFLIEGDLNPDNSDVDKLFIQLVQTYNQLF |
| | | EENPINASGVDAKAILSARLSKSRRLENLIAQLPGEKKNG |
| | | LFGNLIALSLGLTPNFKSNFDLAEDAKLQLSKDTYDDDL |
| | | DNLLAQIGDQYADLFLAAKNLSDAILLSDILRVNTEITKA |
| | | PLSASMIKRYDEHHQDLTLLKALVRQQLPEKYKEIFFDQ |
| | | SKNGYAGYIDGGASQEEFYKFIKPILEKMDGTEELLVKL |
| | | NREDLLRKQRTFDNGSIPHQIHLGELHAILRRQEDFYPFL |
| | | KDNREKIEKILTFRIPYYVGPLARGNSRFAWMTRKSEETI |
| | | TPWNFEEVVDKGASAQSFIERMTNFDKNLPNEKVLPKHS |
| | | LLYEYFTVYNELTKVKYVTEGMRKPAFLSGEQKKAIVD |
| | | LLFKTNRKVTVKQLKEDYFKKIECFDSVEISGVEDRFNA |
| | | SLGTYHDLLKIIKDKDFLDNEENEDILEDIVLTLTLFEDRE |
| | | MIEERLKTYAHLFDDKVMKQLKRRRYTGWGRLSRKLIN |
| | | GIRDKQSGKTILDFLKSDGFANRNFMQLIHDDSLTFKEDI |
| | | QKAQVSGQGDSLHEHIANLAGSPAIKKGILQTVKVVDEL |
| | | VKVMGRHKPENIVIEMARENQTTQKGQKNSRERMKRIE |
| | | EGIKELGSQILKEHPVENTQLQNEKLYLYYLQNGRDMY |
| | | VDQELDINRLSDYDVDHIVPQSFLKDDSIDNKVLTRSDK |
| | | NRGKSDNVPSEEVVKKMKNYWRQLLNAKLITQRKFDN |
| | | LTKAERGGLSELDKAGFIKRQLVETRQITKHVAQILDSR |
| | | MNTKYDENDKLIREVKVITLKSKLVSDFRKDFQFYKVRE |
| | | INNYHHAHDAYLNAVVGTALIKKYPKLESEFVYGDYKV |
| | | YDVRKMIAKSEQEIGKATAKYFFYSNIMNFFKTEITLAN |
| | | GEIRKRPLIETNGETGEIVWDKGRDFATVRKVLSMPQVN |
| | | IVKKTEVQTGGFSKESILPKRNSDKLIARKKDWDPKKYG |
| | | GFDSPTVAYSVLVVAKVEKGKSKKLKSVKELLGITIMER |
| | | SSFEKNPIDFLEAKGYKEVKKDLIIKLPKYSLFELENGRK |
| | | RMLASAGELQKGNELALPSKYVNFLYLASHYEKLKGSP |
| | | EDNEQKQLFVEQHKHYLDEIIEQISEFSKRVILADANLDK |
| | | VLSAYNKHRDKPIREQAENIIHLFTLTNLGAPAAFKYFDT |
| | | TIDRKRYTSTKEVLDATLIHQSITGLYETRIDLSQLGGD |
| 3 | SaCas9 | MKRNYILGLDIGITSVGYGIIDYETRDVIDAGVRLFKEAN |
| | | VENNEGRRSKRGARRLKRRRRHRIQRVKKLLFDYNLLT |
| | | DHSELSGINPYEARVKGLSQKLSEEEFSAALLHLAKRRG |
| | | VHNVNEVEEDTGNELSTKEQISRNSKALEEKYVAELQLE |
| | | RLKKDGEVRGSINRFKTSDYVKEAKQLLKVQKAYHQLD |
| | | QSFIDTYIDLLETRRTYYEGPGEGSPFGWKDIKEWYEML |
| | | MGHCTYFPEELRSVKYAYNADLYNALNDLNNLVITRDE |
| | | NEKLEYYEKFQIIENVFKQKKKPTLKQIAKEILVNEEDIK |
| | | GYRVTSTGKPEFTNLKVYHDIKDITARKEIIENAELLDQI |
| | | AKILTIYQSSEDIQEELTNLNSELTQEEIEQISNLKGYTGT |
| | | HNLSLKAINLILDELWHTNDNQIAIFNRLKLVPKKVDLSQ |
| | | QKEIPTTLVDDFILSPVVKRSFIQSIKVINAIIKKYGLPNDII |
| | | IELAREKNSKDAQKMINEMQKRNRQTNERIEEIIRTTGKE |
| | | NAKYLIEKIKLHDMQEGKCLYSLEAIPLEDLLNNPFNYE |
| | | VDHIIPRSVSFDNSFNNKVLVKQEENSKKGNRTPFQYLSS |
| | | SDSKISYETFKKHILNLAKGKGRISKTKKEYLLEERDINR |
| | | FSVQKDFINRNLVDTRYATRGLMNLLRSYFRVNNLDVK |
| | | VKSINGGFTSFLRRKWKFKKERNKGYKHHAEDALIIANA |
| | | DFIFKEWKKLDKAKKVMENQMFEEKQAESMPEIETEQE |
| | | YKEIFITPHQIKHIKDFKDYKYSHRVDKKPNRELINDTLY |
| | | STRKDDKGNTLIVNNLNGLYDKDNDKLKKLINKSPEKLL |
| | | MYHHDPQTYQKLKLIMEQYGDEKNPLYKYYEETGNYL |
| | | TKYSKKDNGPVIKKIKYYGNKLNAHLDITDDYPNSRNK |
| | | VVKLSLKPYRFDVYLDNGVYKFVTVKNLDVIKKENYYE |
| | | VNSKCYEEAKKLKKISNQAEFIASFYNNDLIKINGELYRV |
| | | IGVNNDLLNRIEVNMIDITYREYLENMNDKRPPRIIKTIAS |
| | | KTQSIKKYSTDILGNLYEVKSKKHPQIIKKG |
| 4 | F. novicida WT | MSIYQEFVNKYSLSKTLRFELIPQGKTLENIKARGLILDD |
| | Cpf1 | EKRAKDYKKAKQIIDKYHQFFIEEILSSVCISEDLLQNYS |
| | | DVYFKLKKSDDDNLQKDFKSAKDTIKKQISEYIKDSEKF |
| | | KNLFNQNLIDAKKGQESDLILWLKQSKDNGIELFKANSD |
| | | ITDIDEALEIIKSFKGWTTYFKGFHENRKNVYSSNDIPTSII |
| | | YRIVDDNLPKFLENKAKYESLKDKAPEAINYEQIKKDLA |
| | | EELTFDIDYKTSEVNQRVFSLDEVFEIANFNNYLNQSGIT |
| | | KFNTIIGGKFVNGENTKRKGINEYINLYSQQINDKTLKKY |
| | | KMSVLFKQILSDTESKSFVIDKLEDDSDVVTTMQSFYEQI |
| | | AAFKTVEEKSIKETLSLLFDDLKAQKLDLSKIYFKNDKSL |
| | | TDLSQQVFDDYSVIGTAVLEYITQQIAPKNLDNPSKKEQE |
| | | LIAKKTEKAKYLSLETIKLALEEFNKHRDIDKQCRFEEIL |
| | | ANFAAIPMIFDEIAQNKDNLAQISIKYQNQGKKDLLQAS |
| | | AEDDVKAIKDLLDQTNNLLHKLKIFHISQSEDKANILDK |
| | | DEHFYLVFEECYFELANIVPLYNKIRNYITQKPYSDEKFK |
| | | LNFENSTLANGWDKNKEPDNTAILFIKDDKYYLGVMNK |
| | | KNNKIFDDKAIKENKGEGYKKIVYKLLPGANKMLPKVF |
| | | FSAKSIKFYNPSEDILRIRNHSTHTKNGSPQKGYEKFEFNI |
| | | EDCRKFIDFYKQSISKHPEWKDFGFRFSDTQRYNSIDEFY |
| | | REVENQGYKLTFENISESYIDSVVNQGKLYLFQIYNKDFS |
| | | AYSKGRPNLHTLYWKALFDERNLQDVVYKLNGEAELF |
| | | YRKQSIPKKITHPAKEAIANKNKDNPKKESVFEYDLIKDK |
| | | RFTEDKFFFHCPITINFKSSGANKENDEINLLLKEKANDV |
| | | HILSIDRGERHLAYYTLVDGKGNIIKQDTFNIIGNDRMKT |
| | | NYHDKLAAIEKDRDSARKDWKKINNIKEMKEGYLSQVV |
| | | HEIAKLVIEYNAIVVFEDLNFGFKRGRFKVEKQVYQKLE |
| | | KMLIEKLNYLVFKDNEFDKTGGVLRAYQLTAPFETFKK |
| | | MGKQTGIIYYVPAGFTSKICPVTGFVNQLYPKYESVSKS |
| | | QEFFSKFDKICYNLDKGYFEFSFDYKNFGDKAAKGKWTI |
| | | ASFGSRLINFRNSDKNHNWDTREVYPTKELEKLLKDYSI |
| | | EYGHGECIKAAICGESDKKFFAKLTSVLNTILQMRNSKT |
| | | GTELDYLISPVADVNGNFFDSRQAPKNMPQDADANGAY |
| | | HIGLKGLMLLGRIKNNQEGKKLNLVIKNEEYFEFVQNRN |
| | | N |
| 5 | CasX | MEKRINKIRKKLSADNATKPVSRSGPMKTLLVRVMTDD |
| | | LKKRLEKRRKKPEVMPQVISNNAANNLRMLLDDYTKM |
| | | KEAILQVYWQEFKDDHVGLMCKFAQPASKKIDQNKLKP |
| | | EMDEKGNLTTAGFACSQCGQPLFVYKLEQVSEKGKAYT |
| | | NYFGRCNVAEHEKLILLAQLKPEKDSDEAVTYSLGKFGQ |
| | | RALDFYSIHVTKESTHPVKPLAQIAGNRYASGPVGKALS |
| | | DACMGTIASFLSKYQDIIIEHQKVVKGNQKRLESLRELA |
| | | GKENLEYPSVTLPPQPHTKEGVDAYNEVIARVRMWVNL |
| | | NLWQKLKLSRDDAKPLLRLKGFPSFPVVERRENEVDWW |
| | | NTINEVKKLIDAKRDMGRVFWSGVTAEKRNTILEGYNY |
| | | LPNENDHKKREGSLENPKKPAKRQFGDLLLYLEKKYAG |
| | | DWGKVFDEAWERIDKKIAGLTSHIEREEARNAEDAQSK |
| | | AVLTDWLRAKASFVLERLKEMDEKEFYACEIQLQKWY |
| | | GDLRGNPFAVEAENRVVDISGFSIGSDGHSIQYRNLLAW |
| | | KYLENGKREFYLLMNYGKKGRIRFTDGTDIKKSGKWQG |
| | | LLYGGGKAKVIDLTFDPDDEQLIILPLAFGTRQGREFIWN |
| | | DLLSLETGLIKLANGRVIEKTIYNKKIGRDEPALFVALTFE |
| | | RREVVDPSNIKPVNLIGVDRGENIPAVIALTDPEGCPLPEF |
| | | KDSSGGPTDILRIGEGYKEKQRAIQAAKEVEQRRAGGYS |
| | | RKFASKSRNLADDMVRNSARDLFYHAVTHDAVLVFENL |
| | | SRGFGRQGKRTFMTERQYTKMEDWLTAKLAYEGLTSK |
| | | TYLSKTLAQYTSKTCSNCGFTITTADYDGMLVRLKKTSD |
| | | GWATTLNNKELKAEGQITYYNRYKRQTVEKELSAELDR |
| | | LSEESGNNDISKWTKGRRDEALFLLKKRFSHRPVQEQFV |
| | | CLDCGHEVHADEQAALNIARSWLFLNSNSTEFKSYKSG |
| | | KQPFVGAWQAFYKRRLKEVWKPNA |
| 6 | CasY | MRKKLFKGYILHNKRLVYTGKAAIRSIKYPLVAPNKTAL |
| | | NNLSEKIIYDYEHLFGPLNVASYARNSNRYSLVDFWIDSL |
| | | RAGVIWQSKSTSLIDLISKLEGSKSPSEKIFEQIDFELKNK |
| | | LDKEQFKDIILLNTGIRSSSNVRSLRGRFLKCFKEEFRDTE |
| | | EVIACVDKWSKDLIVEGKSILVSKQFLYWEEEFGIKIFPH |
| | | FKDNHDLPKLTFFVEPSLEFSPHLPLANCLERLKKFDISR |
| | | ESLLGLDNNFSAFSNYFNELFNLLSRGEIKKIVTAVLAVS |
| | | KSWENEPELEKRLHFLSEKAKLLGYPKLTSSWADYRMII |
| | | GGKIKSWHSNYTEQLIKVREDLKKHQIALDKLQEDLKK |
| | | VVDSSLREQIEAQREALLPLLDTMLKEKDFSDDLELYRFI |
| | | LSDFKSLLNGSYQRYIQTEEERKEDRDVTKKYKDLYSNL |
| | | RNIPRFFGESKKEQFNKFINKSLPTIDVGLKILEDIRNALE |
| | | TVSVRKPPSITEEYVTKQLEKLSRKYKINAFNSNRFKQIT |
| | | EQVLRKYNNGELPKISEVFYRYPRESHVAIRILPVKISNPR |
| | | KDISYLLDKYQISPDWKNSNPGEVVDLIEIYKLTLGWLLS |
| | | CNKDFSMDFSSYDLKLFPEAASLIKNFGSCLSGYYLSKMI |
| | | FNCITSEIKGMITLYTRDKFVVRYVTQMIGSNQKFPLLCL |
| | | VGEKQTKNFSRNWGVLIEEKGDLGEEKNQEKCLIFKDK |
| | | TDFAKAKEVEIFKNNIWRIRTSKYQIQFLNRLFKKTKEW |
| | | DLMNLVLSEPSLVLEEEWGVSWDKDKLLPLLKKEKSCE |
| | | ERLYYSLPLNLVPATDYKEQSAEIEQRNTYLGLDVGEFG |
| | | VAYAVVRIVRDRIELLSWGFLKDPALRKIRERVQDMKK |
| | | KQVMAVESSSSTAVARVREMAIHSLRNQIHSIALAYKAK |
| | | IIYEISISNFETGGNRMAKIYRSIKVSDVYRESGADTLVSE |
| | | MIWGKKNKQMGNHISSYATSYTCCNCARTPFELVIDND |
| | | KEYEKGGDEFIFNVGDEKKVRGFLQKSLLGKTIKGKEVL |
| | | KSIKEYARPPIREVLLEGEDVEQLLKRRGNSYIYRCPFCG |
| | | YKTDADIQAALNIACRGYISDNAKDAVKEGERKLDYILE |
| | | VRKLWEKNGAVLRSAKFL |
| 7 | CasPhi | MADTPTLFTQFLRHHLPGQRFRKDILKQAGRILANKGED |
| | | ATIAFLRGKSEESPPDFQPPVKCPIIACSRPLTEWPIYQAS |
| | | VAIQGYVYGQSLAEFEASDPGCSKDGLLGWFDKTGVCT |
| | | DYFSVQGLNLIFQNARKRYIGVQTKVTNRNEKRHKKLK |
| | | RINAKRIAEGLPELTSDEPESALDETGHLIDPPGLNTNIYC |
| | | YQQVSPKPLALSEVNQLPTAYAGYSTSGDDPIQPMVTKD |
| | | RLSISKGQPGYIPEHQRALLSQKKHRRMRGYGLKARALL |
| | | VIVRIQDDWAVIDLRSLLRNAYWRRIVQTKEPSTITKLLK |
| | | LVTGDPVLDATRMVATFTYKPGIVQVRSAKCLKNKQGS |
| | | KLFSERYLNETVSVTSIDLGSNNLVAVATYRLVNGNTPE |
| | | LLQRFTLPSHLVKDFERYKQAHDTLEDSIQKTAVASLPQ |
| | | GQQTEIRMWSMYGFREAQERVCQELGLADGSIPWNVM |
| | | TATSTILTDLFLARGGDPKKCMFTSEPKKKKNSKQVLYK |
| | | IRDRAWAKMYRTLLSKETREAWNKALWGLKRGSPDYA |
| | | RLSKRKEELARRCVNYTISTAEKRAQCGRTIVALEDLNIG |
| | | FFHGRGKQEPGWVGLFTRKKENRWLMQALHKAFLELA |
| | | HHRGYHVIEVNPAYTSQTCPVCRHCDPDNRDQHNREAF |
| | | HCIGCGFRGNADLDVATHNIAMVAITGESLKRARGSVAS |
| | | KTPQPLAAE |
| 8 | Cas12f1 | MIKVYRYEIVKPLDLDWKEFGTILRQLQQETRFALNKAT |
| | (Cas14a) | QLAWEWMGFSSDYKDNHGEYPKSKDILGYTNVHGYAY |
| | | HTIKTKAYRLNSGNLSQTIKRATDRFKAYQKEILRGDMSI |
| | | PSYKRDIPLDLIKENISVNRMNHGDYIASLSLLSNPAKQE |
| | | MNVKRKISVIIIVRGAGKTIMDRILSGEYQVSASQIIHDDR |
| | | KNKWYLNISYDFEPQTRVLDLNKIMGIDLGVAVAVYMA |
| | | FQHTPARYKLEGGEIENFRRQVESRRISMLRQGKYAGGA |
| | | RGGHGRDKRIKPIEQLRDKIANFRDTTNHRYSRYIVDMA |
| | | IKEGCGTIQMEDLTNIRDIGSRFLQNWTYYDLQQKIIYKA |
| | | EEAGIKVIKIDPQYTSQRCSECGNIDSGNRIGQAIFKCRAC |
| | | GYEANADYNAARNIAIPNIDKIIAESIKSGGS |
| 9 | Cas12f2 | NAMIAQKTIKIKLNPTKEQIIKLNSIIEEYIKVSNFTAKKIA |
| | (Cas14b) | EIQESFTDSGLTQGTCSECGKEKTYRKYHLLKKDNKLFCI |
| | | TCYKRKYSQFTLQKVEFQNKTGLRNVAKLPKTYYTNAI |
| | | RFASDTFSGFDEIIKKKQNRLNSIQNRLNFWKELLYNPSN |
| | | RNEIKIKVVKYAPKTDTREHPHYYSEAEIKGRIKRLEKQL |
| | | KKFKMPKYPEFTSETISLQRELYSWKNPDELKISSITDKN |
| | | ESMNYYGKEYLKRYIDLINSQTPQILLEKENNSFYLCFPIT |
| | | KNIEMPKIDDTFEPVGIDWGITRNIAVVSILDSKTKKPKF |
| | | VKFYSAGYILGKRKHYKSLRKHFGQKKRQDKINKLGTK |
| | | EDRFIDSNIHKLAFLIVKEIRNHSNKPIILMENITDNREEAE |
| | | KSMRQNILLHSVKSRLQNYIAYKALWNNIPTNLVKPEHT |
| | | SQICNRCGHQDRENRPKGSKLFKCVKCNYMSNADFNAS |
| | | INIARKFYIGEYEPFYKDNEKMKSGVNSISM |
| 10 | Cas12f3 | MEVQKTVMKTLSLRILRPLYSQEIEKEIKEEEKERRKQA |
| | (Cas14c) | GGTGELDGGFYKKLEKKHSEMFSFDRLNLLLNQLQREIA |
| | | KVYNHAISELYIATIAQGNKSNKHYISSIVYNRAYGYFYN |
| | | AYIALGICSKVEANFRSNELLTQQSALPTAKSDNFPIVLH |
| | | KQKGAEGEDGGFRISTEGSDLIFEIPIPFYEYNGENRKEPY |
| | | KWVKKGGQKPVLKLILSTFRRQRNKGWAKDEGTDAEIR |
| | | KVTEGKYQVSQIEINRGKKLGEHQKWFANFSIEQPIYER |
| | | KPNRSIVGGLDVGIRSPLVCAINNSFSRYSVDSNDVFKFS |
| | | KQVFAFRRRLLSKNSLKRKHGHAAHKLEPITEMTEKND |
| | | KFRKKIIERWAKEVTNFFVKNQVGIVQIEDLSTMKDRED |
| | | HFFNQYLRGFWPYYQMQTLIENKLKEYGIEVKRVQAKY |
| | | TSQLCSNPNCRYWNNYFNFEYRKVNKFPKFKCEKCNLEI |
| | | SADYNAARNLSTPDIEKFVAKATKGINLPEK |
| 11 | C2c8 | MKVLEFKIHPTEEQVSKIDQSLAACKLLWNLSIALKEESK |
| | | QRYYRKKHKFDEFSPEIWGLSYSGHYDEKEFKTLKDKE |
| | | KKLLIGNPCCKIAYFKKTSNGKEYTPLNSIPIRRFMNAENI |
| | | DKDAVNYLNRKKLAFYFRENTAKFIGEIETEFKKGFFKS |
| | | VIKPAYDAAKKGIRGIPRFKGRRDKVETLVNGQPETIKIK |
| | | SNGVIVSSKIGLLKIRGLDRLQGKAPRMAKITRKATGYY |
| | | LQLTIETDDTIYKESDKCVGLDMGAVAIFTDDLGRQSEA |
| | | KRYAKIQKKRLNRLQRQASRQKDNSNNQRKTYAKLAR |
| | | VHEKIARQRKGRNAQLAHKITSEYQSVILEDLNLKNMTA |
| | | AAKPKEREDGDGYKQNGKKRKSGLNKALLDNAIGQLR |
| | | TFIENKANERGRKIIRVNPKHTSQTCPNCGNIDKANRVSQ |
| | | SKFKCVSCGYEAHADQNAAANILIRGLRDEFLRAIGSLY |
| | | KFPVSMIGKYPGLAGEFTPDLDANQESIGDAPIENAEHSI |
| | | SKQMKQEGNRTPTQPENGSQSLIFLSAPPQPCGDSHGTN |
| | | NPKALPNKASKRSSKKPRGAIPENPDQLTIWDLLD |
| 12 | dSpCas9 | MDKKYSIGLAIGTNSVGWAVITDEYKVPSKKFKVLGNT |
| | | DRHSIKKNLIGALLFDSGETAEATRLKRTARRRYTRRKN |
| | | RICYLQEIFSNEMAKVDDSFFHRLEESFLVEEDKKHERHP |
| | | IFGNIVDEVAYHEKYPTIYHLRKKLVDSTDKADLRLIYLA |
| | | LAHMIKFRGHFLIEGDLNPDNSDVDKLFIQLVQTYNQLF |
| | | EENPINASGVDAKAILSARLSKSRRLENLIAQLPGEKKNG |
| | | LFGNLIALSLGLTPNFKSNFDLAEDAKLQLSKDTYDDDL |
| | | DNLLAQIGDQYADLFLAAKNLSDAILLSDILRVNTEITKA |
| | | PLSASMIKRYDEHHQDLTLLKALVRQQLPEKYKEIFFDQ |
| | | SKNGYAGYIDGGASQEEFYKFIKPILEKMDGTEELLVKL |
| | | NREDLLRKQRTFDNGSIPHQIHLGELHAILRRQEDFYPFL |
| | | KDNREKIEKILTFRIPYYVGPLARGNSRFAWMTRKSEETI |
| | | TPWNFEEVVDKGASAQSFIERMTNFDKNLPNEKVLPKHS |
| | | LLYEYFTVYNELTKVKYVTEGMRKPAFLSGEQKKAIVD |
| | | LLFKTNRKVTVKQLKEDYFKKIECFDSVEISGVEDRFNA |
| | | SLGTYHDLLKIIKDKDFLDNEENEDILEDIVLTLTLFEDRE |
| | | MIEERLKTYAHLFDDKVMKQLKRRRYTGWGRLSRKLIN |
| | | GIRDKQSGKTILDFLKSDGFANRNFMQLIHDDSLTFKEDI |
| | | QKAQVSGQGDSLHEHIANLAGSPAIKKGILQTVKVVDEL |
| | | VKVMGRHKPENIVIEMARENQTTQKGQKNSRERMKRIE |
| | | EGIKELGSQILKEHPVENTQLQNEKLYLYYLQNGRDMY |
| | | VDQELDINRLSDYDVDAIVPQSFLKDDSIDNKVLTRSDK |
| | | NRGKSDNVPSEEVVKKMKNYWRQLLNAKLITQRKFDN |
| | | LTKAERGGLSELDKAGFIKRQLVETRQITKHVAQILDSR |
| | | MNTKYDENDKLIREVKVITLKSKLVSDFRKDFQFYKVRE |
| | | INNYHHAHDAYLNAVVGTALIKKYPKLESEFVYGDYKV |
| | | YDVRKMIAKSEQEIGKATAKYFFYSNIMNFFKTEITLAN |
| | | GEIRKRPLIETNGETGEIVWDKGRDFATVRKVLSMPQVN |
| | | IVKKTEVQTGGFSKESILPKRNSDKLIARKKDWDPKKYG |
| | | GFDSPTVAYSVLVVAKVEKGKSKKLKSVKELLGITIMER |
| | | SSFEKNPIDFLEAKGYKEVKKDLIIKLPKYSLFELENGRK |
| | | RMLASAGELQKGNELALPSKYVNFLYLASHYEKLKGSP |
| | | EDNEQKQLFVEQHKHYLDEIIEQISEFSKRVILADANLDK |
| | | VLSAYNKHRDKPIREQAENIIHLFTLTNLGAPAAFKYFDT |
| | | TIDRKRYTSTKEVLDATLIHQSITGLYETRIDLSQLGGD |
| 13 | dSaCas9 | MKRNYILGLAIGITSVGYGIIDYETRDVIDAGVRLFKEAN |
| | | VENNEGRRSKRGARRLKRRRRHRIQRVKKLLFDYNLLT |
| | | DHSELSGINPYEARVKGLSQKLSEEEFSAALLHLAKRRG |
| | | VHNVNEVEEDTGNELSTKEQISRNSKALEEKYVAELQLE |
| | | RLKKDGEVRGSINRFKTSDYVKEAKQLLKVQKAYHQLD |
| | | QSFIDTYIDLLETRRTYYEGPGEGSPFGWKDIKEWYEML |
| | | MGHCTYFPEELRSVKYAYNADLYNALNDLNNLVITRDE |
| | | NEKLEYYEKFQIIENVFKQKKKPTLKQIAKEILVNEEDIK |
| | | GYRVTSTGKPEFTNLKVYHDIKDITARKEIIENAELLDQI |
| | | AKILTIYQSSEDIQEELTNLNSELTQEEIEQISNLKGYTGT |
| | | HNLSLKAINLILDELWHTNDNQIAIFNRLKLVPKKVDLSQ |
| | | QKEIPTTLVDDFILSPVVKRSFIQSIKVINAIIKKYGLPNDII |
| | | IELAREKNSKDAQKMINEMQKRNRQTNERIEEIIRTTGKE |
| | | NAKYLIEKIKLHDMQEGKCLYSLEAIPLEDLLNNPFNYE |
| | | VDHIIPRSVSFDNSFNNKVLVKQEEASKKGNRTPFQYLSS |
| | | SDSKISYETFKKHILNLAKGKGRISKTKKEYLLEERDINR |
| | | FSVQKDFINRNLVDTRYATRGLMNLLRSYFRVNNLDVK |
| | | VKSINGGFTSFLRRKWKFKKERNKGYKHHAEDALIIANA |
| | | DFIFKEWKKLDKAKKVMENQMFEEKQAESMPEIETEQE |
| | | YKEIFITPHQIKHIKDFKDYKYSHRVDKKPNRELINDTLY |
| | | STRKDDKGNTLIVNNLNGLYDKDNDKLKKLINKSPEKLL |
| | | MYHHDPQTYQKLKLIMEQYGDEKNPLYKYYEETGNYL |
| | | TKYSKKDNGPVIKKIKYYGNKLNAHLDITDDYPNSRNK |
| | | VVKLSLKPYRFDVYLDNGVYKFVTVKNLDVIKKENYYE |
| | | VNSKCYEEAKKLKKISNQAEFIASFYNNDLIKINGELYRV |
| | | IGVNNDLLNRIEVNMIDITYREYLENMNDKRPPRIIKTIAS |
| | | KTQSIKKYSTDILGNLYEVKSKKHPQIIKKG |
| 14 | inactive | MSIYQEFVNKYSLSKTLRFELIPQGKTLENIKARGLILDD |
| | FnCpf1 | EKRAKDYKKAKQIIDKYHQFFIEEILSSVCISEDLLQNYS |
| | | DVYFKLKKSDDDNLQKDFKSAKDTIKKQISEYIKDSEKF |
| | | KNLFNQNLIDAKKGQESDLILWLKQSKDNGIELFKANSD |
| | | ITDIDEALEIIKSFKGWTTYFKGFHENRKNVYSSNDIPTSII |
| | | YRIVDDNLPKFLENKAKYESLKDKAPEAINYEQIKKDLA |
| | | EELTFDIDYKTSEVNQRVFSLDEVFEIANFNNYLNQSGIT |
| | | KFNTIIGGKFVNGENTKRKGINEYINLYSQQINDKTLKKY |
| | | KMSVLFKQILSDTESKSFVIDKLEDDSDVVTTMQSFYEQI |
| | | AAFKTVEEKSIKETLSLLFDDLKAQKLDLSKIYFKNDKSL |
| | | TDLSQQVFDDYSVIGTAVLEYITQQIAPKNLDNPSKKEQE |
| | | LIAKKTEKAKYLSLETIKLALEEFNKHRDIDKQCRFEEIL |
| | | ANFAAIPMIFDEIAQNKDNLAQISIKYQNQGKKDLLQAS |
| | | AEDDVKAIKDLLDQTNNLLHKLKIFHISQSEDKANILDK |
| | | DEHFYLVFEECYFELANIVPLYNKIRNYITQKPYSDEKFK |
| | | LNFENSTLANGWDKNKEPDNTAILFIKDDKYYLGVMNK |
| | | KNNKIFDDKAIKENKGEGYKKIVYKLLPGANKMLPKVF |
| | | FSAKSIKFYNPSEDILRIRNHSTHTKNGSPQKGYEKFEFNI |
| | | EDCRKFIDFYKQSISKHPEWKDFGFRFSDTQRYNSIDEFY |
| | | REVENQGYKLTFENISESYIDSVVNQGKLYLFQIYNKDFS |
| | | AYSKGRPNLHTLYWKALFDERNLQDVVYKLNGEAELF |
| | | YRKQSIPKKITHPAKEAIANKNKDNPKKESVFEYDLIKDK |
| | | RFTEDKFFFHCPITINFKSSGANKFNDEINLLLKEKANDV |
| | | HILSIARGERHLAYYTLVDGKGNIIKQDTFNIIGNDRMKT |
| | | NYHDKLAAIEKDRDSARKDWKKINNIKEMKEGYLSQVV |
| | | HEIAKLVIEYNAIVVFEDLNFGFKRGRFKVEKQVYQKLE |
| | | KMLIEKLNYLVFKDNEFDKTGGVLRAYQLTAPFETFKK |
| | | MGKQTGIIYYVPAGFTSKICPVTGFVNQLYPKYESVSKS |
| | | QEFFSKFDKICYNLDKGYFEFSFDYKNFGDKAAKGKWTI |
| | | ASFGSRLINFRNSDKNHNWDTREVYPTKELEKLLKDYSI |
| | | EYGHGECIKAAICGESDKKFFAKLTSVLNTILQMRNSKT |
| | | GTELDYLISPVADVNGNFFDSRQAPKNMPQDADANGAY |
| | | HIGLKGLMLLGRIKNNQEGKKLNLVIKNEEYFEFVQNRN |
| | | N |
| 15 | dNmeCas9 | MAAFKPNSINYILGLAIGIASVGWAMVEIDEEENPIRLIDL |
| | | GVRVFERAEVPKTGDSLAMARRLARSVRRLTRRRAHRL |
| | | LRTRRLLKREGVLQAANFDENGLIKSLPNTPWQLRAAAL |
| | | DRKLTPLEWSAVLLHLIKHRGYLSQRKNEGETADKELG |
| | | ALLKGVAGNAHALQTGDFRTPAELALNKFEKESGHIRN |
| | | QRSDYSHTFSRKDLQAELILLFEKQKEFGNPHVSGGLKE |
| | | GIETLLMTQRPALSGDAVQKMLGHCTFEPAEPKAAKNT |
| | | YTAERFIWLTKLNNLRILEQGSERPLTDTERATLMDEPY |
| | | RKSKLTYAQARKLLGLEDTAFFKGLRYGKDNAEASTLM |
| | | EMKAYHAISRALEKEGLKDKKSPLNLSPELQDEIGTAFSL |
| | | FKTDEDITGRLKDRIQPEILEALLKHISFDKFVQISLKALR |
| | | RIVPLMEQGKRYDEACAEIYGDHYGKKNTEEKIYLPPIP |
| | | ADEIRNPVVLRALSQARKVINGVVRRYGSPARIHIETARE |
| | | VGKSFKDRKEIEKRQEENRKDREKAAAKFREYFPNFVGE |
| | | PKSKDILKLRLYEQQHGKCLYSGKEINLGRLNEKGYVEI |
| | | DAALPESRTWDDSFNNKVLVLGSENQNKGNQTPYEYEN |
| | | GKDNSREWQEFKARVETSRFPRSKKQRILLQKFDEDGFK |
| | | ERNLNDTRYVNRFLCQFVADRMRLTGKGKKRVFASNG |
| | | QITNLLRGFWGLRKVRAENDRHHALDAVVVACSTVAM |
| | | QQKITRFVRYKEMNAFDGKTIDKETGEVLHQKTHFPQP |
| | | WEFFAQEVMIRVFGKPDGKPEFEEADTLEKLRTLLAEKL |
| | | SSRPEAVHEYVTPLFVSRAPNRKMSGQGHMETVKSAKR |
| | | LDEGVSVLRVPLTQLKLKDLEKMVNREREPKLYEALKA |
| | | RLEAHKDDPAKAFAEPFYKYDKAGNRTQQVKAVRVEQ |
| | | VQKTGVWVRNHNGIADNATMVRVDVFEKGDKYYLVPI |
| | | YSWQVAKGILPDRAVVQGKDEEDWQLIDDSFNFKFSLH |
| | | PNDLVEVITKKARMFGYFASCHRGTGNINIRIHDLDHKIG |
| | | KNGILEGIGVKTALSFQKYQIDELGKEIRPCRLKKRPPVR |
| 16 | dCjCas9 | MARILAFAIGISSIGWAFSENDELKDCGVRIFTKVENPKT |
| | | GESLALPRRLARSARKRLARRKARLNHLKHLIANEFKLN |
| | | YEDYQSFDESLAKAYKGSLISPYELRFRALNELLSKQDF |
| | | ARVILHIAKRRGYDDIKNSDDKEKGAILKAIKQNEEKLA |
| | | NYQSVGEYLYKEYFQKFKENSKEFTNVRNKKESYERCIA |
| | | QSFLKDELKLIFKKQREFGFSFSKKFEEEVLSVAFYKRAL |
| | | KDFSHLVGNCSFFTDEKRAPKNSPLAFMFVALTRIINLLN |
| | | NLKNTEGILYTKDDLNALLNEVLKNGTLTYKQTKKLLG |
| | | LSDDYEFKGEKGTYFIEFKKYKEFIKALGEHNLSQDDLN |
| | | EIAKDITLIKDEIKLKKALAKYDLNQNQIDSLSKLEFKDH |
| | | LNISFKALKLVTPLMLEGKKYDEACNELNLKVAINEDKK |
| | | DFLPAFNETYYKDEVTNPVVLRAIKEYRKVLNALLKKY |
| | | GKVHKINIELAREVGKNHSQRAKIEKEQNENYKAKKDA |
| | | ELECEKLGLKINSKNILKLRLFKEQKEFCAYSGEKIKISDL |
| | | QDEKMLEIDAIYPYSRSFDDSYMNKVLVFTKQNQEKLN |
| | | QTPFEAFGNDSAKWQKIEVLAKNLPTKKQKRILDKNYK |
| | | DKEQKNFKDRNLNDTRYIARLVLNYTKDYLDFLPLSDD |
| | | ENTKLNDTQKGSKVHVEAKSGMLTSALRHTWGFSAKD |
| | | RNNHLHHAIDAVIIAYANNSIVKAFSDFKKEQESNSAELY |
| | | AKKISELDYKNKRKFFEPFSGFRQKVLDKIDEIFVSKPER |
| | | KKPSGALHEETFRKEEEFYQSYGGKEGVLKALELGKIRK |
| | | VNGKIVKNGDMFRVDIFKHKKTNKFYAVPIYTMDFALK |
| | | VLPNKAVARSKKGEIKDWILMDENYEFCFSLYKDSLILIQ |
| | | TKDMQEPEFVYYNAFTSSTVSLIVSKHDNKFETLSKNQK |
| | | ILFKNANEKEVIAKSIGIQNLKVFEKYIVSALGEVTKAEF |
| | | RQREDFKK |
| 17 | dSt1Cas9 | MGSDLVLGLAIGIGSVGVGILNKVTGEIIHKNSRIFPAAQ |
| | | AENNLVRRTNRQGRRLARRKKHRRVRLNRLFEESGLITD |
| | | FTKISINLNPYQLRVKGLTDELSNEELFIALKNMVKHRGI |
| | | SYLDDASDDGNSSVGDYAQIVKENSKQLETKTPGQIQLE |
| | | RYQTYGQLRGDFTVEKDGKKHRLINVFPTSAYRSEALRI |
| | | LQTQQEFNPQITDEFINRYLEILTGKRKYYHGPGNEKSRT |
| | | DYGRYRTSGETLDNIFGILIGKCTFYPDEFRAAKASYTAQ |
| | | EFNLLNDLNNLTVPTETKKLSKEQKNQIINYVKNEKAMG |
| | | PAKLFKYIAKLLSCDVADIKGYRIDKSGKAEIHTFEAYRK |
| | | MKTLETLDIEQMDRETLDKLAYVLTLNTEREGIQEALEH |
| | | EFADGSFSQKQVDELVQFRKANSSIFGKGWHNFSVKLM |
| | | MELIPELYETSEEQMTILTRLGKQKTTSSSNKTKYIDEKL |
| | | LTEEIYNPVVAKSVRQAIKIVNAAIKEYGDFDNIVIEMAR |
| | | ETNEDDEKKAIQKIQKANKDEKDAAMLKAANQYNGKA |
| | | ELPHSVFHGHKQLATKIRLWHQQGERCLYTGKTISIHDLI |
| | | NNSNQFEVDAILPLSITFDDSLANKVLVYATANQEKGQR |
| | | TPYQALDSMDDAWSFRELKAFVRESKTLSNKKKEYLLT |
| | | EEDISKFDVRKKFIERNLVDTRYASRVVLNALQEHFRAH |
| | | KIDTKVSVVRGQFTSQLRRHWGIEKTRDTYHHHAVDALI |
| | | IAASSQLNLWKKQKNTLVSYSEDQLLDIETGELISDDEY |
| | | KESVFKAPYQHFVDTLKSKEFEDSILFSYQVDSKFNRKIS |
| | | DATIYATRQAKVGKDKADETYVLGKIKDIYTQDGYDAF |
| | | MKIYKKDKSKFLMYRHDPQTFEKVIEPILENYPNKQINE |
| | | KGKEVPCNPFLKYKEEHGYIRKYSKKGNGPEIKSLKYYD |
| | | SKLGNHIDITPKDSNNKVVLQSVSPWRADVYFNKTTGK |
| | | YEILGLKYADLQFEKGTGTYKISQEKYNDIKKKEGVDSD |
| | | SEFKFTLYKNDLLLVKDTETKEQQLFRFLSRTMPKQKHY |
| | | VELKPYDKQKFEGGEALIKVLGNVANSGQCKKGLGKSN |
| | | ISIYKVRTDVLGNQHIIKNEGDKPKLDF |
| 18 | dSt3Cas9 | MTKPYSIGLAIGTNSVGWAVITDNYKVPSKKMKVLGNT |
| | | SKKYIKKNLLGVLLFDSGITAEGRRLKRTARRRYTRRRN |
| | | RILYLQEIFSTEMATLDDAFFQRLDDSFLVPDDKRDSKYP |
| | | IFGNLVEEKVYHDEFPTIYHLRKYLADSTKKADLRLVYL |
| | | ALAHMIKYRGHFLIEGEFNSKNNDIQKNFQDFLDTYNAI |
| | | FESDLSLENSKQLEEIVKDKISKLEKKDRILKLFPGEKNSG |
| | | IFSEFLKLIVGNQADFRKCFNLDEKASLHFSKESYDEDLE |
| | | TLLGYIGDDYSDVFLKAKKLYDAILLSGFLTVTDNETEA |
| | | PLSSAMIKRYNEHKEDLALLKEYIRNISLKTYNEVFKDDT |
| | | KNGYAGYIDGKTNQEDFYVYLKNLLAEFEGADYFLEKI |
| | | DREDFLRKQRTFDNGSIPYQIHLQEMRAILDKQAKFYPFL |
| | | AKNKERIEKILTFRIPYYVGPLARGNSDFAWSIRKRNEKI |
| | | TPWNFEDVIDKESSAEAFINRMTSFDLYLPEEKVLPKHSL |
| | | LYETFNVYNELTKVRFIAESMRDYQFLDSKQKKDIVRLY |
| | | FKDKRKVTDKDIIEYLHAIYGYDGIELKGIEKQFNSSLST |
| | | YHDLLNIINDKEFLDDSSNEAIIEEIIHTLTIFEDREMIKQR |
| | | LSKFENIFDKSVLKKLSRRHYTGWGKLSAKLINGIRDEKS |
| | | GNTILDYLIDDGISNRNFMQLIHDDALSFKKKIQKAQIIG |
| | | DEDKGNIKEVVKSLPGSPAIKKGILQSIKIVDELVKVMGG |
| | | RKPESIVVEMARENQYTNQGKSNSQQRLKRLEKSLKEL |
| | | GSKILKENIPAKLSKIDNNALQNDRLYLYYLQNGKDMYT |
| | | GDDLDIDRLSNYDIDHIIPQAFLKDNSIDNKVLVSSASAR |
| | | GKSDDFPSLEVVKKRKTFWYQLLKSKLISQRKFDNLTKA |
| | | ERGGLLPEDKAGFIQRQLVETRQITKHVARLLDEKFNNK |
| | | KDENNRAVRTVKIITLKSTLVSQFRKDFELYKVREINDFH |
| | | HAHDAYLNAVIASALLKKYPKLEPEFVYGDYPKYNSFR |
| | | ERKSATEKVYFYSNIMNIFKKSISLADGRVIERPLIEVNEE |
| | | TGESVWNKESDLATVRRVLSYPQVNVVKKVEEQNHGL |
| | | DRGKPKGLFNANLSSKPKPNSNENLVGAKEYLDPKKYG |
| | | GYAGISNSFAVLVKGTIEKGAKKKITNVLEFQGISILDRIN |
| | | YRKDKLNFLLEKGYKDIELIIELPKYSLFELSDGSRRMLA |
| | | SILSTNNKRGEIHKGNQIFLSQKFVKLLYHAKRISNTINEN |
| | | HRKYVENHKKEFEELFYYILEFNENYVGAKKNGKLLNS |
| | | AFQSWQNHSIDELCSSFIGPTGSERKGLFELTSRGSAADF |
| | | EFLGVKIPRYRDYTPSSLLKDATLIHQSVTGLYETRIDLA |
| | | KLGEG |
| 19 | dLbCpf1 | MSKLEKFTNCYSLSKTLRFKAIPVGKTQENIDNKRLLVE |
| | | DEKRAEDYKGVKKLLDRYYLSFINDVLHSIKLKNLNNYI |
| | | SLFRKKTRTEKENKELENLEINLRKEIAKAFKGNEGYKSL |
| | | FKKDIIETILPEFLDDKDEIALVNSFNGFTTAFTGFFDNRE |
| | | NMFSEEAKSTSIAFRCINENLTRYISNMDIFEKVDAIFDKH |
| | | EVQEIKEKILNSDYDVEDFFEGEFFNFVLTQEGIDVYNAII |
| | | GGFVTESGEKIKGLNEYINLYNQKTKQKLPKFKPLYKQV |
| | | LSDRESLSFYGEGYTSDEEVLEVFRNTLNKNSEIFSSIKKL |
| | | EKLFKNFDEYSSAGIFVKNGPAISTISKDIFGEWNVIRDK |
| | | WNAEYDDIHLKKKAVVTEKYEDDRRKSFKKIGSFSLEQ |
| | | LQEYADADLSVVEKLKEIIIQKVDEIYKVYGSSEKLFDAD |
| | | FVLEKSLKKNDAVVAIMKDLLDSVKSFENYIKAFFGEGK |
| | | ETNRDESFYGDFVLAYDILLKVDHIYDAIRNYVTQKPYS |
| | | KDKFKLYFQNPQFMGGWDKDKETDYRATILRYGSKYY |
| | | LAIMDKKYAKCLQKIDKDDVNGNYEKINYKLLPGPNKM |
| | | LPKVFFSKKWMAYYNPSEDIQKIYKNGTFKKGDMFNLN |
| | | DCHKLIDFFKDSISRYPKWSNAYDFNFSETEKYKDIAGF |
| | | YREVEEQGYKVSFESASKKEVDKLVEEGKLYMFQIYNK |
| | | DFSDKSHGTPNLHTMYFKLLFDENNHGQIRLSGGAELFM |
| | | RRASLKKEELVVHPANSPIANKNPDNPKKTTTLSYDVYK |
| | | DKRFSEDQYELHIPIAINKCPKNIFKINTEVRVLLKHDDNP |
| | | YVIGIARGERNLLYIVVVDGKGNIVEQYSLNEIINNENGIR |
| | | IKTDYHSLLDKKEKERFEARQNWTSIENIKELKAGYISQV |
| | | VHKICELVEKYDAVIALEDLNSGFKNSRVKVEKQVYQK |
| | | FEKMLIDKLNYMVDKKSNPCATGGALKGYQITNKFESF |
| | | KSMSTQNGFIFYIPAWLTSKIDPSTGFVNLLKTKYTSIADS |
| | | KKFISSFDRIMYVPEEDLFEFALDYKNFSRTDADYIKKW |
| | | KLYSYGNRIRIFRNPKKNNVFDWEEVCLTSAYKELFNKY |
| | | GINYQQGDIRALLCEQSDKAFYSSFMALMSLMLQMRNSI |
| | | TGRTDVDFLISPVKNSDGIFYDSRNYEAQENAILPKNAD |
| | | ANGAYNIARKVLWAIGQFKKAEDEKLDKVKIAISNKEW |
| | | LEYAQTSVKH |
| 20 | inactive | MTQFEGFTNLYQVSKTLRFELIPQGKTLKHIQEQGFIEED |
| | AsCpf1 | KARNDHYKELKPIIDRIYKTYADQCLQLVQLDWENLSA |
| | | AIDSYRKEKTEETRNALIEEQATYRNAIHDYFIGRTDNLT |
| | | DAINKRHAEIYKGLFKAELFNGKVLKQLGTVTTTEHENA |
| | | LLRSFDKFTTYFSGFYENRKNVFSAEDISTAIPHRIVQDNF |
| | | PKFKENCHIFTRLITAVPSLREHFENVKKAIGIFVSTSIEEV |
| | | FSFPFYNQLLTQTQIDLYNQLLGGISREAGTEKIKGLNEV |
| | | LNLAIQKNDETAHIIASLPHRFIPLFKQILSDRNTLSFILEE |
| | | FKSDEEVIQSFCKYKTLLRNENVLETAEALFNELNSIDLT |
| | | HIFISHKKLETISSALCDHWDTLRNALYERRISELTGKITK |
| | | SAKEKVQRSLKHEDINLQEIISAAGKELSEAFKQKTSEILS |
| | | HAHAALDQPLPTTLKKQEEKEILKSQLDSLLGLYHLLDW |
| | | FAVDESNEVDPEFSARLTGIKLEMEPSLSFYNKARNYAT |
| | | KKPYSVEKFKLNFQMPTLASGWDVNKEKNNGAILFVKN |
| | | GLYYLGIMPKQKGRYKALSFEPTEKTSEGFDKMYYDYF |
| | | PDAAKMIPKCSTQLKAVTAHFQTHTTPILLSNNFIEPLEIT |
| | | KEIYDLNNPEKEPKKFQTAYAKKTGDQKGYREALCKWI |
| | | DFTRDFLSKYTKTTSIDLSSLRPSSQYKDLGEYYAELNPL |
| | | LYHISFQRIAEKEIMDAVETGKLYLFQIYNKDFAKGHHG |
| | | KPNLHTLYWTGLFSPENLAKTSIKLNGQAELFYRPKSRM |
| | | KRMAHRLGEKMLNKKLKDQKTPIPDTLYQELYDYVNH |
| | | RLSHDLSDEARALLPNVITKEVSHEIIKDRRFTSDKFFFHV |
| | | PITLNYQAANSPSKFNQRVNAYLKEHPETPIIGIARGERN |
| | | LIYITVIDSTGKILEQRSLNTIQQFDYQKKLDNREKERVA |
| | | ARQAWSVVGTIKDLKQGYLSQVIHEIVDLMIHYQAVVV |
| | | LENLNFGFKSKRTGIAEKAVYQQFEKMLIDKLNCLVLKD |
| | | YPAEKVGGVLNPYQLTDQFTSFAKMGTQSGFLFYVPAP |
| | | YTSKIDPLTGFVDPFVWKTIKNHESRKHFLEGFDFLHYD |
| | | VKTGDFILHFKMNRNLSFQRGLPGFMPAWDIVFEKNETQ |
| | | FDAKGTPFIAGKRIVPVIENHRFTGRYRDLYPANELIALL |
| | | EEKGIVERDGSNILPKLLENDDSHAIDTMVALIRSVLQMR |
| | | NSNAATGEDYINSPVRDLNGVCFDSRFQNPEWPMDADA |
| | | NGAYHIALKGQLLLNHLKESKDLKLQNGISNQDWLAYI |
| | | QELRN |
| 21 | inactive | MTQFEGFTNLYQVSKTLRFELIPQGKTLKHIQEQGFIEED |
| | enAsCpf1 | KARNDHYKELKPIIDRIYKTYADQCLQLVQLDWENLSA |
| | | AIDSYRKEKTEETRNALIEEQATYRNAIHDYFIGRTDNLT |
| | | DAINKRHAEIYKGLFKAELFNGKVLKQLGTVTTTEHENA |
| | | LLRSFDKFTTYFSGFYRNRKNVFSAEDISTAIPHRIVQDN |
| | | FPKFKENCHIFTRLITAVPSLREHFENVKKAIGIFVSTSIEE |
| | | VFSFPFYNQLLTQTQIDLYNQLLGGISREAGTEKIKGLNE |
| | | VLNLAIQKNDETAHIIASLPHRFIPLFKQILSDRNTLSFILE |
| | | EFKSDEEVIQSFCKYKTLLRNENVLETAEALFNELNSIDL |
| | | THIFISHKKLETISSALCDHWDTLRNALYERRISELTGKIT |
| | | KSAKEKVQRSLKHEDINLQEIISAAGKELSEAFKQKTSEI |
| | | LSHAHAALDQPLPTTLKKQEEKEILKSQLDSLLGLYHLL |
| | | DWFAVDESNEVDPEFSARLTGIKLEMEPSLSFYNKARNY |
| | | ATKKPYSVEKFKLNFQMPTLARGWDVNREKNNGAILFV |
| | | KNGLYYLGIMPKQKGRYKALSFEPTEKTSEGFDKMYYD |
| | | YFPDAAKMIPKCSTQLKAVTAHFQTHTTPILLSNNFIEPL |
| | | EITKEIYDLNNPEKEPKKFQTAYAKKTGDQKGYREALCK |
| | | WIDFTRDFLSKYTKTTSIDLSSLRPSSQYKDLGEYYAELN |
| | | PLLYHISFQRIAEKEIMDAVETGKLYLFQIYNKDFAKGHH |
| | | GKPNLHTLYWTGLFSPENLAKTSIKLNGQAELFYRPKSR |
| | | MKRMAHRLGEKMLNKKLKDQKTPIPDTLYQELYDYVN |
| | | HRLSHDLSDEARALLPNVITKEVSHEIIKDRRFTSDKFFFH |
| | | VPITLNYQAANSPSKFNQRVNAYLKEHPETPIIGIARGER |
| | | NLIYITVIDSTGKILEQRSLNTIQQFDYQKKLDNREKERV |
| | | AARQAWSVVGTIKDLKQGYLSQVIHEIVDLMIHYQAVV |
| | | VLENLNFGFKSKRTGIAEKAVYQQFEKMLIDKLNCLVLK |
| | | DYPAEKVGGVLNPYQLTDQFTSFAKMGTQSGFLFYVPA |
| | | PYTSKIDPLTGFVDPFVWKTIKNHESRKHFLEGFDFLHYD |
| | | VKTGDFILHFKMNRNLSFQRGLPGFMPAWDIVFEKNETQ |
| | | FDAKGTPFIAGKRIVPVIENHRFTGRYRDLYPANELIALL |
| | | EEKGIVERDGSNILPKLLENDDSHAIDTMVALIRSVLQMR |
| | | NSNAATGEDYINSPVRDLNGVCFDSRFQNPEWPMDADA |
| | | NGAYHIALKGQLLLNHLKESKDLKLQNGISNQDWLAYI |
| | | QELRN |
| 22 | inactive | MTQFEGFTNLYQVSKTLRFELIPQGKTLKHIQEQGFIEED |
| | HFAsCpf1 | KARNDHYKELKPIIDRIYKTYADQCLQLVQLDWENLSA |
| | | AIDSYRKEKTEETRNALIEEQATYRNAIHDYFIGRTDNLT |
| | | DAINKRHAEIYKGLFKAELFNGKVLKQLGTVTTTEHENA |
| | | LLRSFDKFTTYFSGFYRNRKNVFSAEDISTAIPHRIVQDN |
| | | FPKFKENCHIFTRLITAVPSLREHFENVKKAIGIFVSTSIEE |
| | | VFSFPFYNQLLTQTQIDLYNQLLGGISREAGTEKIKGLNE |
| | | VLALAIQKNDETAHIIASLPHRFIPLFKQILSDRNTLSFILE |
| | | EFKSDEEVIQSFCKYKTLLRNENVLETAEALFNELNSIDL |
| | | THIFISHKKLETISSALCDHWDTLRNALYERRISELTGKIT |
| | | KSAKEKVQRSLKHEDINLQEIISAAGKELSEAFKQKTSEI |
| | | LSHAHAALDQPLPTTLKKQEEKEILKSQLDSLLGLYHLL |
| | | DWFAVDESNEVDPEFSARLTGIKLEMEPSLSFYNKARNY |
| | | ATKKPYSVEKFKLNFQMPTLARGWDVNREKNNGAILFV |
| | | KNGLYYLGIMPKQKGRYKALSFEPTEKTSEGFDKMYYD |
| | | YFPDAAKMIPKCSTQLKAVTAHFQTHTTPILLSNNFIEPL |
| | | EITKEIYDLNNPEKEPKKFQTAYAKKTGDQKGYREALCK |
| | | WIDFTRDFLSKYTKTTSIDLSSLRPSSQYKDLGEYYAELN |
| | | PLLYHISFQRIAEKEIMDAVETGKLYLFQIYNKDFAKGHH |
| | | GKPNLHTLYWTGLFSPENLAKTSIKLNGQAELFYRPKSR |
| | | MKRMAHRLGEKMLNKKLKDQKTPIPDTLYQELYDYVN |
| | | HRLSHDLSDEARALLPNVITKEVSHEIIKDRRFTSDKFFFH |
| | | VPITLNYQAANSPSKFNQRVNAYLKEHPETPIIGIARGER |
| | | NLIYITVIDSTGKILEQRSLNTIQQFDYQKKLDNREKERV |
| | | AARQAWSVVGTIKDLKQGYLSQVIHEIVDLMIHYQAVV |
| | | VLENLNFGFKSKRTGIAEKAVYQQFEKMLIDKLNCLVLK |
| | | DYPAEKVGGVLNPYQLTDQFTSFAKMGTQSGFLFYVPA |
| | | PYTSKIDPLTGFVDPFVWKTIKNHESRKHFLEGFDFLHYD |
| | | VKTGDFILHFKMNRNLSFQRGLPGFMPAWDIVFEKNETQ |
| | | FDAKGTPFIAGKRIVPVIENHRFTGRYRDLYPANELIALL |
| | | EEKGIVERDGSNILPKLLENDDSHAIDTMVALIRSVLQMR |
| | | NSNAATGEDYINSPVRDLNGVCFDSRFQNPEWPMDADA |
| | | NGAYHIALKGQLLLNHLKESKDLKLQNGISNQDWLAYI |
| | | QELRN |
| 23 | inactive | MTQFEGFTNLYQVSKTLRFELIPQGKTLKHIQEQGFIEED |
| | RVRAsCpf1 | KARNDHYKELKPIIDRIYKTYADQCLQLVQLDWENLSA |
| | | AIDSYRKEKTEETRNALIEEQATYRNAIHDYFIGRTDNLT |
| | | DAINKRHAEIYKGLFKAELFNGKVLKQLGTVTTTEHENA |
| | | LLRSFDKFTTYFSGFYENRKNVFSAEDISTAIPHRIVQDNF |
| | | PKFKENCHIFTRLITAVPSLREHFENVKKAIGIFVSTSIEEV |
| | | FSFPFYNQLLTQTQIDLYNQLLGGISREAGTEKIKGLNEV |
| | | LNLAIQKNDETAHIIASLPHRFIPLFKQILSDRNTLSFILEE |
| | | FKSDEEVIQSFCKYKTLLRNENVLETAEALFNELNSIDLT |
| | | HIFISHKKLETISSALCDHWDTLRNALYERRISELTGKITK |
| | | SAKEKVQRSLKHEDINLQEIISAAGKELSEAFKQKTSEILS |
| | | HAHAALDQPLPTTLKKQEEKEILKSQLDSLLGLYHLLDW |
| | | FAVDESNEVDPEFSARLTGIKLEMEPSLSFYNKARNYAT |
| | | KKPYSVEKFKLNFQMPTLARGWDVNVEKNRGAILFVKN |
| | | GLYYLGIMPKQKGRYKALSFEPTEKTSEGFDKMYYDYF |
| | | PDAAKMIPKCSTQLKAVTAHFQTHTTPILLSNNFIEPLEIT |
| | | KEIYDLNNPEKEPKKFQTAYAKKTGDQKGYREALCKWI |
| | | DFTRDFLSKYTKTTSIDLSSLRPSSQYKDLGEYYAELNPL |
| | | LYHISFQRIAEKEIMDAVETGKLYLFQIYNKDFAKGHHG |
| | | KPNLHTLYWTGLFSPENLAKTSIKLNGQAELFYRPKSRM |
| | | KRMAHRLGEKMLNKKLKDQKTPIPDTLYQELYDYVNH |
| | | RLSHDLSDEARALLPNVITKEVSHEIIKDRRFTSDKFFFHV |
| | | PITLNYQAANSPSKFNQRVNAYLKEHPETPIIGIARGERN |
| | | LIYITVIDSTGKILEQRSLNTIQQFDYQKKLDNREKERVA |
| | | ARQAWSVVGTIKDLKQGYLSQVIHEIVDLMIHYQAVVV |
| | | LENLNFGFKSKRTGIAEKAVYQQFEKMLIDKLNCLVLKD |
| | | YPAEKVGGVLNPYQLTDQFTSFAKMGTQSGFLFYVPAP |
| | | YTSKIDPLTGFVDPFVWKTIKNHESRKHFLEGFDFLHYD |
| | | VKTGDFILHFKMNRNLSFQRGLPGFMPAWDIVFEKNETQ |
| | | FDAKGTPFIAGKRIVPVIENHRFTGRYRDLYPANELIALL |
| | | EEKGIVERDGSNILPKLLENDDSHAIDTMVALIRSVLQMR |
| | | NSNAATGEDYINSPVRDLNGVCFDSRFQNPEWPMDADA |
| | | NGAYHIALKGQLLLNHLKESKDLKLQNGISNQDWLAYI |
| | | QELRN |
| 24 | inactive | MTQFEGFTNLYQVSKTLRFELIPQGKTLKHIQEQGFIEED |
| | RRAsCpf1 | KARNDHYKELKPIIDRIYKTYADQCLQLVQLDWENLSA |
| | | AIDSYRKEKTEETRNALIEEQATYRNAIHDYFIGRTDNLT |
| | | DAINKRHAEIYKGLFKAELFNGKVLKQLGTVTTTEHENA |
| | | LLRSFDKFTTYFSGFYENRKNVFSAEDISTAIPHRIVQDNF |
| | | PKFKENCHIFTRLITAVPSLREHFENVKKAIGIFVSTSIEEV |
| | | FSFPFYNQLLTQTQIDLYNQLLGGISREAGTEKIKGLNEV |
| | | LNLAIQKNDETAHIIASLPHRFIPLFKQILSDRNTLSFILEE |
| | | FKSDEEVIQSFCKYKTLLRNENVLETAEALFNELNSIDLT |
| | | HIFISHKKLETISSALCDHWDTLRNALYERRISELTGKITK |
| | | SAKEKVQRSLKHEDINLQEIISAAGKELSEAFKQKTSEILS |
| | | HAHAALDQPLPTTLKKQEEKEILKSQLDSLLGLYHLLDW |
| | | FAVDESNEVDPEFSARLTGIKLEMEPSLSFYNKARNYAT |
| | | KKPYSVEKFKLNFQMPTLARGWDVNKEKNNGAILFVKN |
| | | GLYYLGIMPKQKGRYKALSFEPTEKTSEGFDKMYYDYF |
| | | PDAAKMIPRCSTQLKAVTAHFQTHTTPILLSNNFIEPLEIT |
| | | KEIYDLNNPEKEPKKFQTAYAKKTGDQKGYREALCKWI |
| | | DFTRDFLSKYTKTTSIDLSSLRPSSQYKDLGEYYAELNPL |
| | | LYHISFQRIAEKEIMDAVETGKLYLFQIYNKDFAKGHHG |
| | | KPNLHTLYWTGLFSPENLAKTSIKLNGQAELFYRPKSRM |
| | | KRMAHRLGEKMLNKKLKDQKTPIPDTLYQELYDYVNH |
| | | RLSHDLSDEARALLPNVITKEVSHEIIKDRRFTSDKFFFHV |
| | | PITLNYQAANSPSKFNQRVNAYLKEHPETPIIGIARGERN |
| | | LIYITVIDSTGKILEQRSLNTIQQFDYQKKLDNREKERVA |
| | | ARQAWSVVGTIKDLKQGYLSQVIHEIVDLMIHYQAVVV |
| | | LENLNFGFKSKRTGIAEKAVYQQFEKMLIDKLNCLVLKD |
| | | YPAEKVGGVLNPYQLTDQFTSFAKMGTQSGFLFYVPAP |
| | | YTSKIDPLTGFVDPFVWKTIKNHESRKHFLEGFDFLHYD |
| | | VKTGDFILHFKMNRNLSFQRGLPGFMPAWDIVFEKNETQ |
| | | FDAKGTPFIAGKRIVPVIENHRFTGRYRDLYPANELIALL |
| | | EEKGIVERDGSNILPKLLENDDSHAIDTMVALIRSVLQMR |
| | | NSNAATGEDYINSPVRDLNGVCFDSRFQNPEWPMDADA |
| | | NGAYHIALKGQLLLNHLKESKDLKLQNGISNQDWLAYI |
| | | QELRN |
| 25 | dCasX | MEKRINKIRKKLSADNATKPVSRSGPMKTLLVRVMTDD |
| | | LKKRLEKRRKKPEVMPQVISNNAANNLRMLLDDYTKM |
| | | KEAILQVYWQEFKDDHVGLMCKFAQPASKKIDQNKLKP |
| | | EMDEKGNLTTAGFACSQCGQPLFVYKLEQVSEKGKAYT |
| | | NYFGRCNVAEHEKLILLAQLKPEKDSDEAVTYSLGKFGQ |
| | | RALDFYSIHVTKESTHPVKPLAQIAGNRYASGPVGKALS |
| | | DACMGTIASFLSKYQDIIIEHQKVVKGNQKRLESLRELA |
| | | GKENLEYPSVTLPPQPHTKEGVDAYNEVIARVRMWVNL |
| | | NLWQKLKLSRDDAKPLLRLKGFPSFPVVERRENEVDWW |
| | | NTINEVKKLIDAKRDMGRVFWSGVTAEKRNTILEGYNY |
| | | LPNENDHKKREGSLENPKKPAKRQFGDLLLYLEKKYAG |
| | | DWGKVFDEAWERIDKKIAGLTSHIEREEARNAEDAQSK |
| | | AVLTDWLRAKASFVLERLKEMDEKEFYACEIQLQKWY |
| | | GDLRGNPFAVEAENRVVDISGFSIGSDGHSIQYRNLLAW |
| | | KYLENGKREFYLLMNYGKKGRIRFTDGTDIKKSGKWQG |
| | | LLYGGGKAKVIDLTFDPDDEQLIILPLAFGTRQGREFIWN |
| | | DLLSLETGLIKLANGRVIEKTIYNKKIGRDEPALFVALTFE |
| | | RREVVDPSNIKPVNLIGVARGENIPAVIALTDPEGCPLPEF |
| | | KDSSGGPTDILRIGEGYKEKQRAIQAAKEVEQRRAGGYS |
| | | RKFASKSRNLADDMVRNSARDLFYHAVTHDAVLVFAN |
| | | LSRGFGRQGKRTFMTERQYTKMEDWLTAKLAYEGLTS |
| | | KTYLSKTLAQYTSKTCSNCGFTITTADYDGMLVRLKKTS |
| | | DGWATTLNNKELKAEGQITYYNRYKRQTVEKELSAELD |
| | | RLSEESGNNDISKWTKGRRDEALFLLKKRFSHRPVQEQF |
| | | VCLDCGHEVHAAEQAALNIARSWLFLNSNSTEFKSYKS |
| | | GKQPFVGAWQAFYKRRLKEVWKPNA |
| 26 | dCasPhi | MPKPAVESEFSKVLKKHFPGERFRSSYMKRGGKILAAQ |
| | | GEEAVVAYLQGKSEEEPPNFQPPAKCHVVTKSRDFAEW |
| | | PIMKASEAIQRYIYALSTTERAACKPGKSSESHAAWFAA |
| | | TGVSNHGYSHVQGLNLIFDHTLGRYDGVLKKVQLRNEK |
| | | ARARLESINASRADEGLPEIKAEEEEVATNETGHLLQPPG |
| | | INPSFYVYQTISPQAYRPRDEIVLPPEYAGYVRDPNAPIPL |
| | | GVVRNRCDIQKGCPGYIPEWQREAGTAISPKTGKAVTVP |
| | | GLSPKKNKRMRRYWRSEKEKAQDALLVTVRIGTDWVVI |
| | | DVRGLLRNARWRTIAPKDISLNALLDLFTGDPVIDVRRNI |
| | | VTFTYTLDACGTYARKWTLKGKQTKATLDKLTATQTV |
| | | ALVAIALGQTNPISAGISRVTQENGALQCEPLDRFTLPDD |
| | | LLKDISAYRIAWDRNEEELRARSVEALPEAQQAEVRALD |
| | | GVSKETARTQLCADFGLDPKRLPWDKMSSNTTFISEALL |
| | | SNSVSRDQVFFTPAPKKGAKKKAPVEVMRKDRTWARA |
| | | YKPRLSVEAQKLKNEALWALKRTSPEYLKLSRRKEELC |
| | | RRSINYVIEKTRRRTQCQIVIPVIEDLNVRFFHGSGKRLPG |
| | | WDNFFTAKKENRWFIQGLHKAFSDLRTHRSFYVFEVRPE |
| | | RTSITCPKCGHCEVGNRDGEAFQCLSCGKTCNADLDVA |
| | | THNLTQVALTGKTMPKREEPRDAQGTAPARKTKKASKS |
| | | KAPPAEREDQTPAQEPSQTS |
| 27 | inactive VRER | MDKKYSIGLAIGTNSVGWAVITDEYKVPSKKFKVLGNT |
| | SpCas9 | DRHSIKKNLIGALLFDSGETAEATRLKRTARRRYTRRKN |
| | | RICYLQEIFSNEMAKVDDSFFHRLEESFLVEEDKKHERHP |
| | | IFGNIVDEVAYHEKYPTIYHLRKKLVDSTDKADLRLIYLA |
| | | LAHMIKFRGHFLIEGDLNPDNSDVDKLFIQLVQTYNQLF |
| | | EENPINASGVDAKAILSARLSKSRRLENLIAQLPGEKKNG |
| | | LFGNLIALSLGLTPNFKSNFDLAEDAKLQLSKDTYDDDL |
| | | DNLLAQIGDQYADLFLAAKNLSDAILLSDILRVNTEITKA |
| | | PLSASMIKRYDEHHQDLTLLKALVRQQLPEKYKEIFFDQ |
| | | SKNGYAGYIDGGASQEEFYKFIKPILEKMDGTEELLVKL |
| | | NREDLLRKQRTFDNGSIPHQIHLGELHAILRRQEDFYPFL |
| | | KDNREKIEKILTFRIPYYVGPLARGNSRFAWMTRKSEETI |
| | | TPWNFEEVVDKGASAQSFIERMTNFDKNLPNEKVLPKHS |
| | | LLYEYFTVYNELTKVKYVTEGMRKPAFLSGEQKKAIVD |
| | | LLFKTNRKVTVKQLKEDYFKKIECFDSVEISGVEDRFNA |
| | | SLGTYHDLLKIIKDKDFLDNEENEDILEDIVLTLTLFEDRE |
| | | MIEERLKTYAHLFDDKVMKQLKRRRYTGWGRLSRKLIN |
| | | GIRDKQSGKTILDFLKSDGFANRNFMQLIHDDSLTFKEDI |
| | | QKAQVSGQGDSLHEHIANLAGSPAIKKGILQTVKVVDEL |
| | | VKVMGRHKPENIVIEMARENQTTQKGQKNSRERMKRIE |
| | | EGIKELGSQILKEHPVENTQLQNEKLYLYYLQNGRDMY |
| | | VDQELDINRLSDYDVDAIVPQSFLKDDSIDNKVLTRSDK |
| | | NRGKSDNVPSEEVVKKMKNYWRQLLNAKLITQRKFDN |
| | | LTKAERGGLSELDKAGFIKRQLVETRQITKHVAQILDSR |
| | | MNTKYDENDKLIREVKVITLKSKLVSDFRKDFQFYKVRE |
| | | INNYHHAHDAYLNAVVGTALIKKYPKLESEFVYGDYKV |
| | | YDVRKMIAKSEQEIGKATAKYFFYSNIMNFFKTEITLAN |
| | | GEIRKRPLIETNGETGEIVWDKGRDFATVRKVLSMPQVN |
| | | IVKKTEVQTGGFSKESILPKRNSDKLIARKKDWDPKKYG |
| | | GFVSPTVAYSVLVVAKVEKGKSKKLKSVKELLGITIMER |
| | | SSFEKNPIDFLEAKGYKEVKKDLIIKLPKYSLFELENGRK |
| | | RMLASARELQKGNELALPSKYVNFLYLASHYEKLKGSP |
| | | EDNEQKQLFVEQHKHYLDEIIEQISEFSKRVILADANLDK |
| | | VLSAYNKHRDKPIREQAENIIHLFTLTNLGAPAAFKYFDT |
| | | TIDRKEYRSTKEVLDATLIHQSITGLYETRIDLSQLGGD |
| 28 | inactive EQR | MDKKYSIGLAIGTNSVGWAVITDEYKVPSKKFKVLGNT |
| | SpCas9 | DRHSIKKNLIGALLFDSGETAEATRLKRTARRRYTRRKN |
| | | RICYLQEIFSNEMAKVDDSFFHRLEESFLVEEDKKHERHP |
| | | IFGNIVDEVAYHEKYPTIYHLRKKLVDSTDKADLRLIYLA |
| | | LAHMIKFRGHFLIEGDLNPDNSDVDKLFIQLVQTYNQLF |
| | | EENPINASGVDAKAILSARLSKSRRLENLIAQLPGEKKNG |
| | | LFGNLIALSLGLTPNFKSNFDLAEDAKLQLSKDTYDDDL |
| | | DNLLAQIGDQYADLFLAAKNLSDAILLSDILRVNTEITKA |
| | | PLSASMIKRYDEHHQDLTLLKALVRQQLPEKYKEIFFDQ |
| | | SKNGYAGYIDGGASQEEFYKFIKPILEKMDGTEELLVKL |
| | | NREDLLRKQRTFDNGSIPHQIHLGELHAILRRQEDFYPFL |
| | | KDNREKIEKILTFRIPYYVGPLARGNSRFAWMTRKSEETI |
| | | TPWNFEEVVDKGASAQSFIERMTNFDKNLPNEKVLPKHS |
| | | LLYEYFTVYNELTKVKYVTEGMRKPAFLSGEQKKAIVD |
| | | LLFKTNRKVTVKQLKEDYFKKIECFDSVEISGVEDRFNA |
| | | SLGTYHDLLKIIKDKDFLDNEENEDILEDIVLTLTLFEDRE |
| | | MIEERLKTYAHLFDDKVMKQLKRRRYTGWGRLSRKLIN |
| | | GIRDKQSGKTILDFLKSDGFANRNFMQLIHDDSLTFKEDI |
| | | QKAQVSGQGDSLHEHIANLAGSPAIKKGILQTVKVVDEL |
| | | VKVMGRHKPENIVIEMARENQTTQKGQKNSRERMKRIE |
| | | EGIKELGSQILKEHPVENTQLQNEKLYLYYLQNGRDMY |
| | | VDQELDINRLSDYDVDAIVPQSFLKDDSIDNKVLTRSDK |
| | | NRGKSDNVPSEEVVKKMKNYWRQLLNAKLITQRKFDN |
| | | LTKAERGGLSELDKAGFIKRQLVETRQITKHVAQILDSR |
| | | MNTKYDENDKLIREVKVITLKSKLVSDFRKDFQFYKVRE |
| | | INNYHHAHDAYLNAVVGTALIKKYPKLESEFVYGDYKV |
| | | YDVRKMIAKSEQEIGKATAKYFFYSNIMNFFKTEITLAN |
| | | GEIRKRPLIETNGETGEIVWDKGRDFATVRKVLSMPQVN |
| | | IVKKTEVQTGGFSKESILPKRNSDKLIARKKDWDPKKYG |
| | | GFESPTVAYSVLVVAKVEKGKSKKLKSVKELLGITIMER |
| | | SSFEKNPIDFLEAKGYKEVKKDLIIKLPKYSLFELENGRK |
| | | RMLASAGELQKGNELALPSKYVNFLYLASHYEKLKGSP |
| | | EDNEQKQLFVEQHKHYLDEIIEQISEFSKRVILADANLDK |
| | | VLSAYNKHRDKPIREQAENIIHLFTLTNLGAPAAFKYFDT |
| | | TIDRKQYRSTKEVLDATLIHQSITGLYETRIDLSQLGGD |
| 29 | inactive VQR | MDKKYSIGLAIGTNSVGWAVITDEYKVPSKKFKVLGNT |
| | SpCas9 | DRHSIKKNLIGALLFDSGETAEATRLKRTARRRYTRRKN |
| | | RICYLQEIFSNEMAKVDDSFFHRLEESFLVEEDKKHERHP |
| | | IFGNIVDEVAYHEKYPTIYHLRKKLVDSTDKADLRLIYLA |
| | | LAHMIKFRGHFLIEGDLNPDNSDVDKLFIQLVQTYNQLF |
| | | EENPINASGVDAKAILSARLSKSRRLENLIAQLPGEKKNG |
| | | LFGNLIALSLGLTPNFKSNFDLAEDAKLQLSKDTYDDDL |
| | | DNLLAQIGDQYADLFLAAKNLSDAILLSDILRVNTEITKA |
| | | PLSASMIKRYDEHHQDLTLLKALVRQQLPEKYKEIFFDQ |
| | | SKNGYAGYIDGGASQEEFYKFIKPILEKMDGTEELLVKL |
| | | NREDLLRKQRTFDNGSIPHQIHLGELHAILRRQEDFYPFL |
| | | KDNREKIEKILTFRIPYYVGPLARGNSRFAWMTRKSEETI |
| | | TPWNFEEVVDKGASAQSFIERMTNFDKNLPNEKVLPKHS |
| | | LLYEYFTVYNELTKVKYVTEGMRKPAFLSGEQKKAIVD |
| | | LLFKTNRKVTVKQLKEDYFKKIECFDSVEISGVEDRFNA |
| | | SLGTYHDLLKIIKDKDFLDNEENEDILEDIVLTLTLFEDRE |
| | | MIEERLKTYAHLFDDKVMKQLKRRRYTGWGRLSRKLIN |
| | | GIRDKQSGKTILDFLKSDGFANRNFMQLIHDDSLTFKEDI |
| | | QKAQVSGQGDSLHEHIANLAGSPAIKKGILQTVKVVDEL |
| | | VKVMGRHKPENIVIEMARENQTTQKGQKNSRERMKRIE |
| | | EGIKELGSQILKEHPVENTQLQNEKLYLYYLQNGRDMY |
| | | VDQELDINRLSDYDVDAIVPQSFLKDDSIDNKVLTRSDK |
| | | NRGKSDNVPSEEVVKKMKNYWRQLLNAKLITQRKFDN |
| | | LTKAERGGLSELDKAGFIKRQLVETRQITKHVAQILDSR |
| | | MNTKYDENDKLIREVKVITLKSKLVSDFRKDFQFYKVRE |
| | | INNYHHAHDAYLNAVVGTALIKKYPKLESEFVYGDYKV |
| | | YDVRKMIAKSEQEIGKATAKYFFYSNIMNFFKTEITLAN |
| | | GEIRKRPLIETNGETGEIVWDKGRDFATVRKVLSMPQVN |
| | | IVKKTEVQTGGFSKESILPKRNSDKLIARKKDWDPKKYG |
| | | GFVSPTVAYSVLVVAKVEKGKSKKLKSVKELLGITIMER |
| | | SSFEKNPIDFLEAKGYKEVKKDLIIKLPKYSLFELENGRK |
| | | RMLASAGELQKGNELALPSKYVNFLYLASHYEKLKGSP |
| | | EDNEQKQLFVEQHKHYLDEIIEQISEFSKRVILADANLDK |
| | | VLSAYNKHRDKPIREQAENIIHLFTLTNLGAPAAFKYFDT |
| | | TIDRKQYRSTKEVLDATLIHQSITGLYETRIDLSQLGGD |
| 30 | inactive SPG | MDKKYSIGLAIGTNSVGWAVITDEYKVPSKKFKVLGNT |
| | SpCas9 | DRHSIKKNLIGALLFDSGETAEATRLKRTARRRYTRRKN |
| | | RICYLQEIFSNEMAKVDDSFFHRLEESFLVEEDKKHERHP |
| | | IFGNIVDEVAYHEKYPTIYHLRKKLVDSTDKADLRLIYLA |
| | | LAHMIKFRGHFLIEGDLNPDNSDVDKLFIQLVQTYNQLF |
| | | EENPINASGVDAKAILSARLSKSRRLENLIAQLPGEKKNG |
| | | LFGNLIALSLGLTPNFKSNFDLAEDAKLQLSKDTYDDDL |
| | | DNLLAQIGDQYADLFLAAKNLSDAILLSDILRVNTEITKA |
| | | PLSASMIKRYDEHHQDLTLLKALVRQQLPEKYKEIFFDQ |
| | | SKNGYAGYIDGGASQEEFYKFIKPILEKMDGTEELLVKL |
| | | NREDLLRKQRTFDNGSIPHQIHLGELHAILRRQEDFYPFL |
| | | KDNREKIEKILTFRIPYYVGPLARGNSRFAWMTRKSEETI |
| | | TPWNFEEVVDKGASAQSFIERMTNFDKNLPNEKVLPKHS |
| | | LLYEYFTVYNELTKVKYVTEGMRKPAFLSGEQKKAIVD |
| | | LLFKTNRKVTVKQLKEDYFKKIECFDSVEISGVEDRFNA |
| | | SLGTYHDLLKIIKDKDFLDNEENEDILEDIVLTLTLFEDRE |
| | | MIEERLKTYAHLFDDKVMKQLKRRRYTGWGRLSRKLIN |
| | | GIRDKQSGKTILDFLKSDGFANRNFMQLIHDDSLTFKEDI |
| | | QKAQVSGQGDSLHEHIANLAGSPAIKKGILQTVKVVDEL |
| | | VKVMGRHKPENIVIEMARENQTTQKGQKNSRERMKRIE |
| | | EGIKELGSQILKEHPVENTQLQNEKLYLYYLQNGRDMY |
| | | VDQELDINRLSDYDVDAIVPQSFLKDDSIDNKVLTRSDK |
| | | NRGKSDNVPSEEVVKKMKNYWRQLLNAKLITQRKFDN |
| | | LTKAERGGLSELDKAGFIKRQLVETRQITKHVAQILDSR |
| | | MNTKYDENDKLIREVKVITLKSKLVSDFRKDFQFYKVRE |
| | | INNYHHAHDAYLNAVVGTALIKKYPKLESEFVYGDYKV |
| | | YDVRKMIAKSEQEIGKATAKYFFYSNIMNFFKTEITLAN |
| | | GEIRKRPLIETNGETGEIVWDKGRDFATVRKVLSMPQVN |
| | | IVKKTEVQTGGFSKESILPKRNSDKLIARKKDWDPKKYG |
| | | GFLWPTVAYSVLVVAKVEKGKSKKLKSVKELLGITIME |
| | | RSSFEKNPIDFLEAKGYKEVKKDLIIKLPKYSLFELENGR |
| | | KRMLASAKQLQKGNELALPSKYVNFLYLASHYEKLKGS |
| | | PEDNEQKQLFVEQHKHYLDEIIEQISEFSKRVILADANLD |
| | | KVLSAYNKHRDKPIREQAENIIHLFTLTNLGAPAAFKYFD |
| | | TTIDRKQYRSTKEVLDATLIHQSITGLYETRIDLSQLGGD |
| 31 | inactive SpRY | MDKKYSIGLAIGTNSVGWAVITDEYKVPSKKFKVLGNT |
| | Cas9 | DRHSIKKNLIGALLFDSGETAERTRLKRTARRRYTRRKN |
| | | RICYLQEIFSNEMAKVDDSFFHRLEESFLVEEDKKHERHP |
| | | IFGNIVDEVAYHEKYPTIYHLRKKLVDSTDKADLRLIYLA |
| | | LAHMIKFRGHFLIEGDLNPDNSDVDKLFIQLVQTYNQLF |
| | | EENPINASGVDAKAILSARLSKSRRLENLIAQLPGEKKNG |
| | | LFGNLIALSLGLTPNFKSNFDLAEDAKLQLSKDTYDDDL |
| | | DNLLAQIGDQYADLFLAAKNLSDAILLSDILRVNTEITKA |
| | | PLSASMIKRYDEHHQDLTLLKALVRQQLPEKYKEIFFDQ |
| | | SKNGYAGYIDGGASQEEFYKFIKPILEKMDGTEELLVKL |
| | | NREDLLRKQRTFDNGSIPHQIHLGELHAILRRQEDFYPFL |
| | | KDNREKIEKILTFRIPYYVGPLARGNSRFAWMTRKSEETI |
| | | TPWNFEEVVDKGASAQSFIERMTNFDKNLPNEKVLPKHS |
| | | LLYEYFTVYNELTKVKYVTEGMRKPAFLSGEQKKAIVD |
| | | LLFKTNRKVTVKQLKEDYFKKIECFDSVEISGVEDRFNA |
| | | SLGTYHDLLKIIKDKDFLDNEENEDILEDIVLTLTLFEDRE |
| | | MIEERLKTYAHLFDDKVMKQLKRRRYTGWGRLSRKLIN |
| | | GIRDKQSGKTILDFLKSDGFANRNFMQLIHDDSLTFKEDI |
| | | QKAQVSGQGDSLHEHIANLAGSPAIKKGILQTVKVVDEL |
| | | VKVMGRHKPENIVIEMARENQTTQKGQKNSRERMKRIE |
| | | EGIKELGSQILKEHPVENTQLQNEKLYLYYLQNGRDMY |
| | | VDQELDINRLSDYDVDAIVPQSFLKDDSIDNKVLTRSDK |
| | | NRGKSDNVPSEEVVKKMKNYWRQLLNAKLITQRKFDN |
| | | LTKAERGGLSELDKAGFIKRQLVETRQITKHVAQILDSR |
| | | MNTKYDENDKLIREVKVITLKSKLVSDFRKDFQFYKVRE |
| | | INNYHHAHDAYLNAVVGTALIKKYPKLESEFVYGDYKV |
| | | YDVRKMIAKSEQEIGKATAKYFFYSNIMNFFKTEITLAN |
| | | GEIRKRPLIETNGETGEIVWDKGRDFATVRKVLSMPQVN |
| | | IVKKTEVQTGGFSKESIRPKRNSDKLIARKKDWDPKKYG |
| | | GFLWPTVAYSVLVVAKVEKGKSKKLKSVKELLGITIME |
| | | RSSFEKNPIDFLEAKGYKEVKKDLIIKLPKYSLFELENGR |
| | | KRMLASAKQLQKGNELALPSKYVNFLYLASHYEKLKGS |
| | | PEDNEQKQLFVEQHKHYLDEIIEQISEFSKRVILADANLD |
| | | KVLSAYNKHRDKPIREQAENIIHLFTLTRLGAPRAFKYFD |
| | | TTIDPKQYRSTKEVLDATLIHQSITGLYETRIDLSQLGGD |
| 32 | inactive KKH | MKRNYILGLAIGITSVGYGIIDYETRDVIDAGVRLFKEAN |
| | dSaCas9 | VENNEGRRSKRGARRLKRRRRHRIQRVKKLLFDYNLLT |
| | | DHSELSGINPYEARVKGLSQKLSEEEFSAALLHLAKRRG |
| | | VHNVNEVEEDTGNELSTKEQISRNSKALEEKYVAELQLE |
| | | RLKKDGEVRGSINRFKTSDYVKEAKQLLKVQKAYHQLD |
| | | QSFIDTYIDLLETRRTYYEGPGEGSPFGWKDIKEWYEML |
| | | MGHCTYFPEELRSVKYAYNADLYNALNDLNNLVITRDE |
| | | NEKLEYYEKFQIIENVFKQKKKPTLKQIAKEILVNEEDIK |
| | | GYRVTSTGKPEFTNLKVYHDIKDITARKEIIENAELLDQI |
| | | AKILTIYQSSEDIQEELTNLNSELTQEEIEQISNLKGYTGT |
| | | HNLSLKAINLILDELWHTNDNQIAIFNRLKLVPKKVDLSQ |
| | | QKEIPTTLVDDFILSPVVKRSFIQSIKVINAIIKKYGLPNDII |
| | | IELAREKNSKDAQKMINEMQKRNRQTNERIEEIIRTTGKE |
| | | NAKYLIEKIKLHDMQEGKCLYSLEAIPLEDLLNNPFNYE |
| | | VDHIIPRSVSFDNSFNNKVLVKQEEASKKGNRTPFQYLSS |
| | | SDSKISYETFKKHILNLAKGKGRISKTKKEYLLEERDINR |
| | | FSVQKDFINRNLVDTRYATRGLMNLLRSYFRVNNLDVK |
| | | VKSINGGFTSFLRRKWKFKKERNKGYKHHAEDALIIANA |
| | | DFIFKEWKKLDKAKKVMENQMFEEKQAESMPEIETEQE |
| | | YKEIFITPHQIKHIKDFKDYKYSHRVDKKPNRKLINDTLY |
| | | STRKDDKGNTLIVNNLNGLYDKDNDKLKKLINKSPEKLL |
| | | MYHHDPQTYQKLKLIMEQYGDEKNPLYKYYEETGNYL |
| | | TKYSKKDNGPVIKKIKYYGNKLNAHLDITDDYPNSRNK |
| | | VVKLSLKPYRFDVYLDNGVYKFVTVKNLDVIKKENYYE |
| | | VNSKCYEEAKKLKKISNQAEFIASFYKNDLIKINGELYRV |
| | | IGVNNDLLNRIEVNMIDITYREYLENMNDKRPPHIIKTIAS |
| | | KTQSIKKYSTDILGNLYEVKSKKHPQIIKKG |
| 33 | ZIM3 | MNNSQGRVTFEDVTVNFTQGEWQRLNPEQRNLYRDVM |
| | | LENYSNLVSVGQGETTKPDVILRLEQGKEPWLEEEEVLG |
| | | SGRAEKNGDIGGQIWKPKDVKESL |
| 34 | ZNF436 | MAATLLMAGSQAPVTFEDMAMYLTREEWRPLDAAQRD |
| | | LYRDVMQENYGNVVSLDFEIRSENEVNPKQEISEDVQFG |
| | | TTSERPAENAEENPESEEGFESGDRSERQW |
| 35 | ZNF257 | MLENYRNLVFLGIAVSKPDLITCLEQGKEPCNMKRHEM |
| | | VAKPPVMCSHIAEDLCPERDIKYFFQKVILRRYDKCEHE |
| | | NLQLRKGCKSVDECKVCK |
| 36 | ZNF675 | MGLLTFRDVAIEFSLEEWQCLDTAQRNLYKNVILENYRN |
| | | LVFLGIAVSKQDLITCLEQEKEPLTVKRHEMVNEPPVMC |
| | | SHFAQEFWPEQNIKDSF |
| 37 | ZNF490 | MLQMQNSEHHGQSIKTQTDSISLEDVAVNFTLEEWALL |
| | | DPGQRNIYRDVMRATFKNLACIGEKWKDQDIEDEHKNQ |
| | | GRNLRSPMVEALCENKEDCPCGKSTSQIPDLNTNLETPT |
| | | G |
| 38 | ZNF320 | MALSQGLLTFRDVAIEFSQEEWKCLDPAQRTLYRDVML |
| | | ENYRNLVSLDISSKCMMNTLSSTGQGNTEVIHTGTLQRQ |
| | | ASYHIGAFCSQEIEKDIHDFVFQ |
| 39 | ZNF331 | MAQGLVTFADVAIDFSQEEWACLNSAQRDLYWDVMLE |
| | | NYSNLVSLDLESAYENKSLPTKKNIHEIRASKRNSDRRSK |
| | | SLGRNWICEGTLERPQRSRGR |
| 40 | ZNF816 | MLREEATKKSKEKEPGMALPQGRLTFRDVAIEFSLEEWK |
| | | CLNPAQRALYRAVMLENYRNLEFVDSSLKSMMEFSSTR |
| | | HSITGEVIHTGTLQRHKSHHIGDFCFPEMKKDIHHFEFQW |
| | | Q |
| 41 | ZNF680 | MPGPPGSLEMGPLTFRDVAIEFSLEEWQCLDTAQRNLYR |
| | | KVMFENYRNLVFLGIAVSKPHLITCLEQGKEPWNRKRQE |
| | | MVAKPPVIYSHFTEDLWPEHSIKDSF |
| 42 | ZNF41 | MSPPWSPALAAEGRGSSCEASVSFEDVTVDFSKEEWQH |
| | | LDPAQRRLYWDVTLENYSHLLSVGYQIPKSEAAFKLEQ |
| | | GEGPWMLEGEAPHQSCSGEAIGKMQQQGIPGGIFFHC |
| 43 | ZNF189 | MASPSPPPESKEEWDYLDPAQRSLYKDVMMENYGNLVS |
| | | LDVLNRDKDEEPTVKQEIEEIEEEVEPQGVIVTRIKSEIDQ |
| | | DPMGRETFELVGRLDKQRGIFLWEIPRESL |
| 44 | ZNF528 | MALTQGPLKFMDVAIEFSQEEWKCLDPAQRTLYRDVML |
| | | ENYRNLVSLGICLPDLSVTSMLEQKRDPWTLQSEEKIAN |
| | | DPDGRECIKGVNTERSSKLGSN |
| 45 | ZNF543 | MAASAQVSVTFEDVAVTFTQEEWGQLDAAQRTLYQEV |
| | | MLETCGLLMSLGCPLFKPELIYQLDHRQELWMATKDLS |
| | | QSSYPGDNTKPKTTEPTFSHLALPE |
| 46 | ZNF554 | MFSQEERMAAGYLPRWSQELVTFEDVSMDFSQEEWELL |
| | | EPAQKNLYREVMLENYRNVVSLEALKNQCTDVGIKEGP |
| | | LSPAQTSQVTSLSSWTGYLLFQPVASSHLEQREALWIEE |
| | | KGTPQASCSDWMTVLRNQDSTYKKVALQE |
| 47 | ZNF140 | MSQGSVTFRDVAIDFSQEEWKWLQPAQRDLYRCVMLE |
| | | NYGHLVSLGLSISKPDVVSLLEQGKEPWLGKREVKRDLF |
| | | SVSESSGEIKDFSPKNVIYDD |
| 48 | ZNF610 | MEEAQKRKAKESGMALPQGRLTFMDVAIEFSQEEWKSL |
| | | DPGQRALYRDVMLENYRNLVFLGRSCVLGSNAENKPIK |
| | | NQLGLTLESHLSELQLFQAGRKIYRSNQVEKFTNHR |
| 49 | ZNF264 | MAAAVLTDRAQVSVTFDDVAVTFTKEEWGQLDLAQRT |
| | | LYQEVMLENCGLLVSLGCPVPKAELICHLEHGQEPWTR |
| | | KEDLSQDTCPGDKGKPKTTEPTTCEPALSE |
| 50 | ZNF350 | MIQAQESITLEDVAVDFTWEEWQLLGAAQKDLYRDVM |
| | | LENYSNLVAVGYQASKPDALFKLEQGEQLWTIEDGIHSG |
| | | ACSDIWKVDHVLERLQSESLVNR |
| 51 | ZNF8 | MEGVAGVMSVGPPAARLQEPVTFRDVAVDFTQEEWGQ |
| | | LDPTQRILYRDVMLETFGHLLSIGPELPKPEVISQLEQGTE |
| | | LWVAERGTTQGCHPAWEPRSESQASRKEEGLPEE |
| 52 | ZNF582 | MSLGSELFRDVAIVFSQEEWQWLAPAQRDLYRDVMLET |
| | | YSNLVSLGLAVSKPDVISFLEQGKEPWMVERVVSGGLCP |
| | | VLESRYDTKELFPKQHVYEV |
| 53 | ZNF30 | MAHKYVGLQYHGSVTFEDVAIAFSQQEWESLDSSQRGL |
| | | YRDVMLENYRNLVSMAGHSRSKPHVIALLEQWKEPEVT |
| | | VRKDGRRWCTDLQLEDDTIGCKEMPTSEN |
| 54 | ZNF324 | MAFEDVAVYFSQEEWGLLDTAQRALYRRVMLDNFALV |
| | | ASLGLSTSRPRVVIQLERGEEPWVPSGTDTTLSRTTYRRR |
| | | NPGSWSLTEDRDVSG |
| 55 | ZNF98 | MLENYRNLVFVGIAASKPDLITCLEQGKEPWNVKRHEM |
| | | VTEPPVVYSYFAQDLWPKQGKKNYFQKVILRTYKKCGR |
| | | ENLQLRKYCKSMDECKVHKECYNGLNQC |
| 56 | ZNF669 | MHFRRPDPCREPLASPIQDSVAFEDVAVNFTQEEWALLD |
| | | SSQKNLYREVMQETCRNLASVGSQWKDQNIEDHFEKPG |
| | | KDIRNHIVQRLCESKEDGQYGEVVSQIPNLDLNENISTGL |
| | | KPCECSICGK |
| 57 | ZNF677 | MALSQGLFTFKDVAIEFSQEEWECLDPAQRALYRDVML |
| | | ENYRNLLSLDEDNIPPEDDISVGFTSKGLSPKENNKEELY |
| | | HLVILERKESHGINNFDLKEVWENMPKFDSLW |
| 58 | ZNF596 | MTFEDIIVDFTQEEWALLDTSQRKLFQDVMLENISHLVSI |
| | | GKQLCKSVVLSQLEQVEKLSTQRISLLQGREVGIKHQEIP |
| | | FIHHIYQKGTSTISTMRS |
| 59 | ZNF214 | MAVTFEDVTIIFTWEEWKFLDSSQKRLYREVMWENYTN |
| | | VMSVENWNESYKSQEEKFRYLEYENFSYWQGWWNAG |
| | | AQMYENQNYGETVQGTDSKDLTQQDRSQC |
| 60 | ZNF37A | MITSQGSVSFRDVTVGFTQEEWQHLDPAQRTLYRDVML |
| | | ENYSHLVSVGYCIPKPEVILKLEKGEEPWILEEKFPSQSH |
| | | LELINTSRNYSIMKFNEFNKG |
| 61 | ZNF34 | MFEDVAVYLSREEWGRLGPAQRGLYRDVMLETYGNLV |
| | | SLGVGPAGPKPGVISQLERGDEPWVLDVQGTSGKEHLR |
| | | VNSPALGTRTEYKELTSQETFGEEDPQGSEPVEACDHIS |
| 62 | ZNF250 | METYGNVVSLGLPGSKPDIISQLERGEDPWVLDRKGAK |
| | | KSQGLWSDYSDNLKYDHTTACTQQDSLSCPWECETKGE |
| | | SQNTDLSPKPLISEQTVILGKTPLGRIDQENNETKQ |
| 63 | ZNF547 | MAEMNPAQGHVVFEDVAIYFSQEEWGHLDEAQRLLYR |
| | | DVMLENLALLSSLGCCHGAEDEEAPLEPGVSVGVSQVM |
| | | APKPCLSTQNTQPCETCSSLLKDILRL |
| 64 | ZNF273 | MLDNYRNLVFLGIAVSKPDLITCLEQGKEPCNMKRHAM |
| | | VAKPPVVCSHFAQDLWPKQGLKDS |
| 65 | ZNF354A | MAAGQREARPQVSLTFEDVAVLFTRDEWRKLAPSQRNL |
| | | YRDVMLENYRNLVSLGLPFTKPKVISLLQQGEDPWEVE |
| | | KDGSGVSSLGSKSSHKTTKSTQTQDSSFQ |
| 66 | ZFP82 | MALRSVMFSDVSIDFSPEEWEYLDLEQKDLYRDVMLEN |
| | | YSNLVSLGCFISKPDVISSLEQGKEPWKVVRKGRRQYPD |
| | | LETKYETKKLSLENDIYEIN |
| 67 | ZNF224 | MTTFKEAMTFKDVAVVFTEEELGLLDLAQRKLYRDVM |
| | | LENFRNLLSVGHQAFHRDTFHFLREEKIWMMKTAIQRE |
| | | GNSGDKIQTEMETVSEAGTHQEW |
| 68 | ZNF33A | MFQVEQKSQESVSFKDVTVGFTQEEWQHLDPSQRALYR |
| | | DVMLENYSNLVSVGYCVHKPEVIFRLQQGEEPWKQEEE |
| | | FPSQSFPEVWTADHLKERSQENQSKHL |
| 69 | ZNF45 | MTKSKEAVTFKDVAVVFSEEELQLLDLAQRKLYRDVML |
| | | ENFRNVVSVGHQSTPDGLPQLEREEKLWMMKMATQRD |
| | | NSSGAKNLKEMETLQEVGLRYLP |
| 70 | ZNF175 | MSQKPQVLGPEKQDGSCEASVSFEDVTVDFSREEWQQL |
| | | DPAQRCLYRDVMLELYSHLFAVGYHIPNPEVIFRMLKEK |
| | | EPRVEEAEVSHQRCQEREFGLEIPQKEISKKASFQ |
| 71 | ZNF595 | MELVTFRDVAIEFSPEEWKCLDPAQQNLYRDVMLENYR |
| | | NLVSLGFVISNPDLVTCLEQIKEPCNLKIHETAAKPPAICS |
| | | PFSQDLSPVQGIEDSF |
| 72 | ZNF184 | MSTLLQGGHNLLSSASFQESVTFKDVIVDFTQEEWKQLD |
| | | PGQRDLFRDVTLENYTHLVSIGLQVSKPDVISQLEQGTEP |
| | | WIMEPSIPVGTCADWETRLENSVSAPEPDISEE |
| 73 | ZNF419 | MDPAQVPVAADLLTDHEEGYVTFEDVAVYFSQEEWRLL |
| | | DDAQRLLYRNVMLENFTLLASLGLASSKTHEITQLESWE |
| | | EPFMPAWEVVTSAIPRGCWHGAEAEEAPEQIASVG |
| 74 | ZFP28-1 | MKKLEAVGTGIEPKAMSQGLVTFGDVAVDFSQEEWEW |
| | | LNPIQRNLYRKVMLENYRNLASLGLCVSKPDVISSLEQG |
| | | KEPWTVKRKMTRAWCPDLKAVWKIKELPLKKDFCEG |
| 75 | ZFP28-2 | MSLLGEHWDYDALFETQPGLVTIKNLAVDFRQQLHPAQ |
| | | KNFCKNGIWENNSDLGSAGHCVAKPDLVSLLEQEKEPW |
| | | MVKRELTGSLFSGQRSVHETQELFPKQDSYAE |
| 76 | ZNF18 | MLALAASQPARLEERLIRDRDLGASLLPAAPQEQWRQL |
| | | DSTQKEQYWDLILETYGKMVSGAGISHPKSDLTNSIEFG |
| | | EELAGIYLHVNEKIPRPTCIGDRQENDKENLNLENH |
| 77 | ZNF213 | MEGRPGETTDTCFVSGVHGPVALGDIPFYFSREEWGTLD |
| | | PAQRDLFWDIKRENSRNTTLGFGLKGQSEKSLLQEMVPV |
| | | VPGQTGSDVTVSWSPEEAEAWESENRPRAALGPVVGAR |
| | | RGRPPTRRRQFRDLA |
| 78 | ZNF394 | MVAVVRALQRALDGTSSQGMVTFEDTAVSLTWEEWER |
| | | LDPARRDFCRESAQKDSGSTVPPSLESRVENKELIPMQQI |
| | | LEEAEPQGQLQEAFQGKRPLFSKCGSTHEDRVEKQSGDP |
| 79 | ZFP1 | MNKSQGSVSFTDVTVDFTQEEWEQLDPSQRILYMDVML |
| | | ENYSNLLSVEVWKADDQMERDHRNPDEQARQFLILKNQ |
| | | TPIEERGDLFGKALNLNTDFVSLRQVPYKYDLYEKTL |
| 80 | ZFP14 | MAHGSVTFRDVAIDFSQEEWEFLDPAQRDLYRDVMWE |
| | | NYSNFISLGPSISKPDVITLLDEERKEPGMVVREGTRRYC |
| | | PDLESRYRTNTLSPEKDIYEIYSFQWDIMER |
| 81 | ZNF416 | MAAAVLRDSTSVPVTAEAKLMGFTQGCVTFEDVAIYFS |
| | | QEEWGLLDEAQRLLYRDVMLENFALITALVCWHGMED |
| | | EETPEQSVSVEGVPQVRTPEASPSTQKIQSCDMCVPFLTD |
| | | ILHLTDLPGQELYLTGACAVFHQDQK |
| 82 | ZNF557 | MLPPTAASQREGHTEGGELVNELLKSWLKGLVTFEDVA |
| | | VEFTQEEWALLDPAQRTLYRDVMLENCRNLASLGNQV |
| | | DKPRLISQLEQEDKVMTEERGILSGTCPDVENPFKAKGL |
| | | TPKLHVFRKEQSRNMKMER |
| 83 | ZNF566 | MAQESVMFSDVSVDFSQEEWECLNDDQRDLYRDVMLE |
| | | NYSNLVSMGHSISKPNVISYLEQGKEPWLADRELTRGQ |
| | | WPVLESRCETKKLFLKKEIYEIESTQWEIMEK |
| 84 | ZNF729 | MPGAPGSLEMGPLTFRDVTIEFSLEEWQCLDTVQQNLYR |
| | | DVMLENYRNLVFLGMAVFKPDLITCLKQGKEPWNMKR |
| | | HEMVTKPPVMRSHFTQDLWPDQSTKDSFQEVILRTYAR |
| 85 | ZIM2 | MAGSQFPDFKHLGTFLVFEELVTFEDVLVDFSPEELSSLS |
| | | AAQRNLYREVMLENYRNLVSLGHQFSKPDIISRLEEEES |
| | | YAMETDSRHTVICQGE |
| 86 | ZNF254 | MPGPPRSLEMGLLTFRDVAIEFSLEEWQHLDIAQQNLYR |
| | | NVMLENYRNLAFLGIAVSKPDLITCLEQGKEPWNMKRH |
| | | E |
| 87 | ZNF764 | MAPPLAPLPPRDPNGAGPEWREPGAVSFADVAVYFCRE |
| | | EWGCLRPAQRALYRDVMRETYGHLSALGIGGNKPALIS |
| | | WVEEEAELWGPAAQDPE |
| 88 | ZNF785 | MGPPLAPRPAHVPGEAGPRRTRESRPGAVSFADVAVYFS |
| | | PEEWECLRPAQRALYRDVMRETFGHLGALGFSVPKPAFI |
| | | SWVEGEVEAWSPEAQDPDGESS |
| 89 | ZNF10 (KOX1) | MDAKSLTAWSRTLVTFKDVFVDFTREEWKLLDTAQQIV |
| | | YRNVMLENYKNLVSLGYQLTKPDVILRLEKGEEPWLVE |
| | | REIHQETHPDSETAFEIKSSVSSRSIFKDKQSCDIKMEGM |
| | | ARNDLWYLSLEEVWKCRDQLDKYQENPERHLRQVAFT |
| | | QKKVLTQERVSESGKYGGNCLLPAQLVLREYFHKRDSH |
| | | TKSLKHDLVLNGHQDSCASNSNECGQTFCQNIHLIQFAR |
| | | THTGDKSYKCPDNDNSLTHGSSLGISKGIHREKPYECKE |
| | | CGKFFSWRSNLTRHQLIHTGEKPYECKECGKSFSRSSHLI |
| | | GHQKTHTGEEPYECKECGKSFSWFSHLVTHQRTHTGDK |
| | | LYTCNQCGKSFVHSSRLIRHQRTHTGEKPYECPECGKSF |
| | | RQSTHLILHQRTHVRVRPYECNECGKSYSQRSHLVVHHR |
| | | IHTGLKPFECKDCGKCFSRSSHLYSHQRTHTGEKPYECH |
| | | DCGKSFSQSSALIVHQRIHTGEKPYECCQCGKAFIRKNDL |
| | | IKHQRIHVGEETYKCNQCGIIFSQNSPFIVHQIAHTGEQFL |
| | | TCNQCGTALVNTSNLIGYQTNHIRENAY |
| 90 | CBX5 | MGKKTKRTADSSSSEDEEEYVVEKVLDRRVVKGQVEYL |
| | (chromoshadow | LKWKGFSEEHNTWEPEKNLDCPELISEFMKKYKKMKEG |
| | domain) | ENNKPREKSESNKRKSNFSNSADDIKSKKKREQSNDIAR |
| | | GFERGLEPEKIIGATDSCGDLMFLMKWKDTDEADLVLA |
| | | KEANVKCPQIVIAFYEERLTWHAYPEDAENKEKETAKS |
| 91 | RYBP | MTMGDKKSPTRPKRQAKPAADEGFWDCSVCTFRNSAE |
| | (YAF2_RYBP | AFKCSICDVRKGTSTRKPRINSQLVAQQVAQQYATPPPP |
| | component of | KKEKKEKVEKQDKEKPEKDKEISPSVTKKNTNKKTKPK |
| | PRC1) | SDILKDPPSEANSIQSANATTKTSETNHTSRPRLKNVDRS |
| | | TAQQLAVTVGNVTVIITDFKEKTRSSSTSSSTVTSSAGSE |
| | | QQNQSSSGSESTDKGSSRSSTPKGDMSAVNDESF |
| 92 | YAF2 | MGDKKSPTRPKRQPKPSSDEGYWDCSVCTFRNSAEAFK |
| | (YAF2_RYBP | CMMCDVRKGTSTRKPRPVSQLVAQQVTQQFVPPTQSKK |
| | component of | EKKDKVEKEKSEKETTSKKNSHKKTRPRLKNVDRSSAQ |
| | PRC1) | HLEVTVGDLTVIITDFKEKTKSPPASSAASADQHSQSGSS |
| | | SDNTERGMSRSSSPRGEASSLNGESH |
| 93 | MGA | MEEKQQIILANQDGGTVAGAAPTFFVILKQPGNGKTDQG |
| | (component of | ILVTNQDACALASSVSSPVKSKGKICLPADCTVGGITVTL |
| | PRC1.6) | DNNSMWNEFYHRSTEMILTKQGRRMFPYCRYWITGLDS |
| | | NLKYILVMDISPVDNHRYKWNGRWWEPSGKAEPHVLG |
| | | RVFIHPESPSTGHYWMHQPVSFYKLKLTNNTLDQEGHIIL |
| | | HSMHRYLPRLHLVPAEKAVEVIQLNGPGVHTFTFPQTEF |
| | | FAVTAYQNIQITQLKIDYNPFAKGFRDDGLNNKPQRDGK |
| | | QKNSSDQEGNNISSSSGHRVRLTEGQGSEIQPGDLDPLSR |
| | | GHETSGKGLEKTSLNIKRDFLGFMDTDSALSEVPQLKQEI |
| | | SECLIASSFEDDSRVASPLDQNGSFNVVIKEEPLDDYDYE |
| | | LGECPEGVTVKQEETDEETDVYSNSDDDPILEKQLKRHN |
| | | KVDNPEADHLSSKWLPSSPSGVAKAKMFKLDTGKMPV |
| | | VYLEPCAVTRSTVKISELPDNMLSTSRKDKSSMLAELEY |
| | | LPTYIENSNETAFCLGKESENGLRKHSPDLRVVQKYPLL |
| | | KEPQWKYPDISDSISTERILDDSKDSVGDSLSGKEDLGRK |
| | | RTTMLKIATAAKVVNANQNASPNVPGKRGRPRKLKLCK |
| | | AGRPPKNTGKSLISTKNTPVSPGSTFPDVKPDLEDVDGV |
| | | LFVSFESKEALDIHAVDGTTEESSSLQASTTNDSGYRARI |
| | | SQLEKELIEDLKTLRHKQVIHPGLQEVGLKLNSVDPTMSI |
| | | DLKYLGVQLPLAPATSFPFWNLTGTNPASPDAGFPFVSR |
| | | TGKTNDFTKIKGWRGKFHSASASRNEGGNSESSLKNRSA |
| | | FCSDKLDEYLENEGKLMETSMGFSSNAPTSPVVYQLPTK |
| | | STSYVRTLDSVLKKQSTISPSTSYSLKPHSVPPVSRKAKS |
| | | QNRQATFSGRTKSSYKSILPYPVSPKQKYSHVILGDKVT |
| | | KNSSGIISENQANNFVVPTLDENIFPKQISLRQAQQQQQQ |
| | | QQGSRPPGLSKSQVKLMDLEDCALWEGKPRTYITEERA |
| | | DVSLTTLLTAQASLKTKPIHTIIRKRAPPCNNDFCRLGCV |
| | | CSSLALEKRQPAHCRRPDCMFGCTCLKRKVVLVKGGSK |
| | | TKHFQRKAAHRDPVFYDTLGEEAREEEEGIREEEEQLKE |
| | | KKKRKKLEYTICETEPEQPVRHYPLWVKVEGEVDPEPV |
| | | YIPTPSVIEPMKPLLLPQPEVLSPTVKGKLLTGIKSPRSYT |
| | | PKPNPVIREEDKDPVYLYFESMMTCARVRVYERKKEDQ |
| | | RQPSSSSSPSPSFQQQTSCHSSPENHNNAKEPDSEQQPLK |
| | | QLTCDLEDDSDKLQEKSWKSSCNEGESSSTSYMHQRSP |
| | | GGPTKLIEIISDCNWEEDRNKILSILSQHINSNMPQSLKVG |
| | | SFIIELASQRKSRGEKNPPVYSSRVKISMPSCQDQDDMAE |
| | | KSGSETPDGPLSPGKMEDISPVQTDALDSVRERLHGGKG |
| | | LPFYAGLSPAGKLVAYKRKPSSSTSGLIQVASNAKVAAS |
| | | RKPRTLLPSTSNSKMASSSGTATNRPGKNLKAFVPAKRPI |
| | | AARPSPGGVFTQFVMSKVGALQQKIPGVSTPQTLAGTQ |
| | | KFSIRPSPVMVVTPVVSSEPVQVCSPVTAAVTTTTPQVFL |
| | | ENTTAVTPMTAISDVETKETTYSSGATTTGVVEVSETNT |
| | | STSVTSTQSTATVNLTKTTGITTPVASVAFPKSLVASPSTI |
| | | TLPVASTASTSLVVVTAAASSSMVTTPTSSLGSVPIILSGI |
| | | NGSPPVSQRPENAAQIPVATPQVSPNTVKRAGPRLLLIPV |
| | | QQGSPTLRPVSNTQLQGHRMVLQPVRSPSGMNLFRHPN |
| | | GQIVQLLPLHQLRGSNTQPNLQPVMFRNPGSVMGIRLPA |
| | | PSKPSETPPSSTSSSAFSVMNPVIQAVGSSSAVNVITQAPS |
| | | LLSSGASFVSQAGTLTLRISPPEPQSFASKTGSETKITYSS |
| | | GGQPVGTASLIPLQSGSFALLQLPGQKPVPSSILQHVASL |
| | | QMKRESQNPDQKDETNSIKREQETKKVLQSEGEAVDPE |
| | | ANVIKQNSGAATSEETLNDSLEDRGDHLDEECLPEEGCA |
| | | TVKPSEHSCITGSHTDQDYKDVNEEYGARNRKSSKEKV |
| | | AVLEVRTISEKASNKTVQNLSKVQHQKLGDVKVEQQKG |
| | | FDNPEENSSEFPVTFKEESKFELSGSKVMEQQSNLQPEAK |
| | | EKECGDSLEKDRERWRKHLKGPLTRKCVGASQECKKEA |
| | | DEQLIKETKTCQENSDVFQQEQGISDLLGKSGITEDARVL |
| | | KTECDSWSRISNPSAFSIVPRRAAKSSRGNGHFQGHLLLP |
| | | GEQIQPKQEKKGGRSSADFTVLDLEEDDEDDNEKTDDSI |
| | | DEIVDVVSDYQSEEVDDVEKNNCVEYIEDDEEHVDIETV |
| | | EELSEEINVAHLKTTAAHTQSFKQPSCTHISADEKAAERS |
| | | RKAPPIPLKLKPDYWSDKLQKEAEAFAYYRRTHTANER |
| | | RRRGEMRDLFEKLKITLGLLHSSKVSKSLILTRAFSEIQGL |
| | | TDQADKLIGQKNLLTRKRNILIRKVSSLSGKTEEVVLKKL |
| | | EYIYAKQQALEAQKRKKKMGSDEFDISPRISKQQEGSSA |
| | | SSVDLGQMFINNRRGKPLILSRKKDQATENTSPLNTPHTS |
| | | ANLVMTPQGQLLTLKGPLFSGPVVAVSPDLLESDLKPQV |
| | | AGSAVALPENDDLFMMPRIVNVTSLATEGGLVDMGGSK |
| | | YPHEVPDSKPSDHLKDTVRNEDNSLEDKGRISSRGNRDG |
| | | RVTLGPTQVFLANKDSGYPQIVDVSNMQKAQEFLPKKIS |
| | | GDMRGIQYKWKESESRGERVKSKDSSFHKLKMKDLKDS |
| | | SIEMELRKVTSAIEEAALDSSELLTNMEDEDDTDETLTSL |
| | | LNEIAFLNQQLNDDSVGLAELPSSMDTEFPGDARRAFISK |
| | | VPPGSRATFQVEHLGTGLKELPDVQGESDSISPLLLHLED |
| | | DDFSENEKQLAEPASEPDVLKIVIDSEIKDSLLSNKKAIDG |
| | | GKNTSGLPAEPESVSSPPTLHMKTGLENSNSTDTLWRPM |
| | | PKLAPLGLKVANPSSDADGQSLKVMPCLAPIAAKVGSV |
| | | GHKMNLTGNDQEGRESKVMPTLAPVVAKLGNSGASPSS |
| | | AGK |
| 94 | CBX1 | MGKKQNKKKVEEVLEEEEEEYVVEKVLDRRVVKGKVE |
| | (chromoshadow) | YLLKWKGFSDEDNTWEPEENLDCPDLIAEFLQSQKTAHE |
| | | TDKSEGGKRKADSDSEDKGEESKPKKKKEESEKPRGFA |
| | | RGLEPERIIGATDSSGELMFLMKWKNSDEADLVPAKEAN |
| | | VKCPQVVISFYEERLTWHSYPSEDDDKKDDKN |
| 95 | SCMH1 | MLVCYSVLACEILWDLPCSIMGSPLGHFTWDKYLKETCS |
| | (SAM_1/SPM) | VPAPVHCFKQSYTPPSNEFKISMKLEAQDPRNTTSTCIAT |
| | | VVGLTGARLRLRLDGSDNKNDFWRLVDSAEIQPIGNCE |
| | | KNGGMLQPPLGFRLNASSWPMFLLKTLNGAEMAPIRIFH |
| | | KEPPSPSHNFFKMGMKLEAVDRKNPHFICPATIGEVRGS |
| | | EVLVTFDGWRGAFDYWCRFDSRDIFPVGWCSLTGDNLQ |
| | | PPGTKVVIPKNPYPASDVNTEKPSIHSSTKTVLEHQPGQR |
| | | GRKPGKKRGRTPKTLISHPISAPSKTAEPLKFPKKRGPKP |
| | | GSKRKPRTLLNPPPASPTTSTPEPDTSTVPQDAATIPSSAM |
| | | QAPTVCIYLNKNGSTGPHLDKKKVQQLPDHFGPARASV |
| | | VLQQAVQACIDCAYHQKTVFSFLKQGHGGEVISAVFDR |
| | | EQHTLNLPAVNSITYVLRFLEKLCHNLRSDNLFGNQPFT |
| | | QTHLSLTAIEYSHSHDRYLPGETFVLGNSLARSLEPHSDS |
| | | MDSASNPTNLVSTSQRHRPLLSSCGLPPSTASAVRRLCSR |
| | | GVLKGSNERRDMESFWKLNRSPGSDRYLESRDASRLSG |
| | | RDPSSWTVEDVMQFVREADPQLGPHADLFRKHEIDGKA |
| | | LLLLRSDMMMKYMGLKLGPALKLSYHIDRLKQGKF |
| 96 | MPP8 | MEQVAEGARVTAVPVSAADSTEELAEVEEGVGVVGED |
| | (Chromodomain) | NDAAARGAEAFGDSEEDGEDVFEVEKILDMKTEGGKVL |
| | | YKVRWKGYTSDDDTWEPEIHLEDCKEVLLEFRKKIAEN |
| | | KAKAVRKDIQRLSLNNDIFEANSDSDQQSETKEDTSPKK |
| | | KKKKLRQREEKSPDDLKKKKAKAGKLKDKSKPDLESSL |
| | | ESLVFDLRTKKRISEAKEELKESKKPKKDEVKETKELKK |
| | | VKKGEIRDLKTKTREDPKENRKTKKEKFVESQVESESSV |
| | | LNDSPFPEDDSEGLHSDSREEKQNTKSARERAGQDMGLE |
| | | HGFEKPLDSAMSAEEDTDVRGRRKKKTPRKAEDTRENR |
| | | KLENKNAFLEKKTVPKKQRNQDRSKSAAELEKLMPVSA |
| | | QTPKGRRLSGEERGLWSTDSAEEDKETKRNESKEKYQK |
| | | RHDSDKEEKGRKEPKGLKTLKEIRNAFDLFKLTPEEKND |
| | | VSENNRKREEIPLDFKTIDDHKTKENKQSLKERRNTRDE |
| | | TDTWAYIAAEGDQEVLDSVCQADENSDGRQQILSLGMD |
| | | LQLEWMKLEDFQKHLDGKDENFAATDAIPSNVLRDAVK |
| | | NGDYITVKVALNSNEEYNLDQEDSSGMTLVMLAAAGG |
| | | QDDLLRLLITKGAKVNGRQKNGTTALIHAAEKNFLTTV |
| | | AILLEAGAFVNVQQSNGETALMKACKRGNSDIVRLVIEC |
| | | GADCNILSKHQNSALHFAKQSNNVLVYDLLKNHLETLS |
| | | RVAEETIKDYFEARLALLEPVFPIACHRLCEGPDFSTDFN |
| | | YKPPQNIPEGSGILLFIFHANFLGKEVIARLCGPCSVQAVV |
| | | LNDKFQLPVFLDSHFVYSFSPVAGPNKLFIRLTEAPSAKV |
| | | KLLIGAYRVQLQ |
| 97 | SUMO3 (Rad60- | MSEEKPKEGVKTENDHINLKVAGQDGSVVQFKIKRHTP |
| | SLD) | LSKLMKAYCERQGLSMRQIRFRFDGQPINETDTPAQLEM |
| | | EDEDTIDVFQQQTGGVPESSLAGHSF |
| 98 | HERC2 (Cyt-b5) | MPSESFCLAAQARLDSKWLKTDIQLAFTRDGLCGLWNE |
| | | MVKDGEIVYTGTESTQNGELPPRKDDSVEPSGTKKEDLN |
| | | DKEKKDEEETPAPIYRAKSILDSWVWGKQPDVNELKEC |
| | | LSVLVKEQQALAVQSATTTLSALRLKQRLVILERYFIALN |
| | | RTVFQENVKVKWKSSGISLPPVDKKSSRPAGKGVEGLA |
| | | RVGSRAALSFAFAFLRRAWRSGEDADLCSELLQESLDAL |
| | | RALPEASLFDESTVSSVWLEVVERATRFLRSVVTGDVHG |
| | | TPATKGPGSIPLQDQHLALAILLELAVQRGTLSQMLSAIL |
| | | LLLQLWDSGAQETDNERSAQGTSAPLLPLLQRFQSIICRK |
| | | DAPHSEGDMHLLSGPLSPNESFLRYLTLPQDNELAIDLRQ |
| | | TAVVVMAHLDRLATPCMPPLCSSPTSHKGSLQEVIGWG |
| | | LIGWKYYANVIGPIQCEGLANLGVTQIACAEKRFLILSRN |
| | | GRVYTQAYNSDTLAPQLVQGLASRNIVKIAAHSDGHHY |
| | | LALAATGEVYSWGCGDGGRLGHGDTVPLEEPKVISAFS |
| | | GKQAGKHVVHIACGSTYSAAITAEGELYTWGRGNYGRL |
| | | GHGSSEDEAIPMLVAGLKGLKVIDVACGSGDAQTLAVT |
| | | ENGQVWSWGDGDYGKLGRGGSDGCKTPKLIEKLQDLD |
| | | VVKVRCGSQFSIALTKDGQVYSWGKGDNQRLGHGTEE |
| | | HVRYPKLLEGLQGKKVIDVAAGSTHCLALTEDSEVHSW |
| | | GSNDQCQHFDTLRVTKPEPAALPGLDTKHIVGIACGPAQ |
| | | SFAWSSCSEWSIGLRVPFVVDICSMTFEQLDLLLRQVSEG |
| | | MDGSADWPPPQEKECVAVATLNLLRLQLHAAISHQVDP |
| | | EFLGLGLGSILLNSLKQTVVTLASSAGVLSTVQSAAQAV |
| | | LQSGWSVLLPTAEERARALSALLPCAVSGNEVNISPGRR |
| | | FMIDLLVGSLMADGGLESALHAAITAEIQDIEAKKEAQK |
| | | EKEIDEQEANASTFHRSRTPLDKDLINTGICESSGKQCLPL |
| | | VQLIQQLLRNIASQTVARLKDVARRISSCLDFEQHSRERS |
| | | ASLDLLLRFQRLLISKLYPGESIGQTSDISSPELMGVGSLL |
| | | KKYTALLCTHIGDILPVAASIASTSWRHFAEVAYIVEGDF |
| | | TGVLLPELVVSIVLLLSKNAGLMQEAGAVPLLGGLLEHL |
| | | DRFNHLAPGKERDDHEELAWPGIMESFFTGQNCRNNEE |
| | | VTLIRKADLENHNKDGGFWTVIDGKVYDIKDFQTQSLT |
| | | GNSILAQFAGEDPVVALEAALQFEDTRESMHAFCVGQY |
| | | LEPDQEIVTIPDLGSLSSPLIDTERNLGLLLGLHASYLAMS |
| | | TPLSPVEIECAKWLQSSIFSGGLQTSQIHYSYNEEKDEDH |
| | | CSSPGGTPASKSRLCSHRRALGDHSQAFLQAIADNNIQD |
| | | HNVKDFLCQIERYCRQCHLTTPIMFPPEHPVEEVGRLLLC |
| | | CLLKHEDLGHVALSLVHAGALGIEQVKHRTLPKSVVDV |
| | | CRVVYQAKCSLIKTHQEQGRSYKEVCAPVIERLRFLFNE |
| | | LRPAVCNDLSIMSKFKLLSSLPRWRRIAQKIIRERRKKRV |
| | | PKKPESTDDEEKIGNEESDLEEACILPHSPINVDKRPIAIKS |
| | | PKDKWQPLLSTVTGVHKYKWLKQNVQGLYPQSPLLSTI |
| | | AEFALKEEPVDVEKMRKCLLKQLERAEVRLEGIDTILKL |
| | | ASKNFLLPSVQYAMFCGWQRLIPEGIDIGEPLTDCLKDV |
| | | DLIPPFNRMLLEVTFGKLYAWAVQNIRNVLMDASAKFK |
| | | ELGIQPVPLQTITNENPSGPSLGTIPQARFLLVMLSMLTLQ |
| | | HGANNLDLLLNSGMLALTQTALRLIGPSCDNVEEDMNA |
| | | SAQGASATVLEETRKETAPVQLPVSGPELAAMMKIGTR |
| | | VMRGVDWKWGDQDGPPPGLGRVIGELGEDGWIRVQW |
| | | DTGSTNSYRMGKEGKYDLKLAELPAAAQPSAEDSDTED |
| | | DSEAEQTERNIHPTAMMFTSTINLLQTLCLSAGVHAEIM |
| | | QSEATKTLCGLLRMLVESGTTDKTSSPNRLVYREQHRS |
| | | WCTLGFVRSIALTPQVCGALSSPQWITLLMKVVEGHAPF |
| | | TATSLQRQILAVHLLQAVLPSWDKTERARDMKCLVEKL |
| | | FDFLGSLLTTCSSDVPLLRESTLRRRRVRPQASLTATHSS |
| | | TLAEEVVALLRTLHSLTQWNGLINKYINSQLRSITHSFVG |
| | | RPSEGAQLEDYFPDSENPEVGGLMAVLAVIGGIDGRLRL |
| | | GGQVMHDEFGEGTVTRITPKGKITVQFSDMRTCRVCPLN |
| | | QLKPLPAVAFNVNNLPFTEPMLSVWAQLVNLAGSKLEK |
| | | HKIKKSTKQAFAGQVDLDLLRCQQLKLYILKAGRALLSH |
| | | QDKLRQILSQPAVQETGTVHTDDGAVVSPDLGDMSPEG |
| | | PQPPMILLQQLLASATQPSPVKAIFDKQELEAAALAVCQ |
| | | CLAVESTHPSSPGFEDCSSSEATTPVAVQHIRPARVKRRK |
| | | QSPVPALPIVVQLMEMGFSRRNIEFALKSLTGASGNASSL |
| | | PGVEALVGWLLDHSDIQVTELSDADTVSDEYSDEEVVE |
| | | DVDDAAYSMSTGAVVTESQTYKKRADFLSNDDYAVYV |
| | | RENIQVGMMVRCCRAYEEVCEGDVGKVIKLDRDGLHD |
| | | LNVQCDWQQKGGTYWVRYIHVELIGYPPPSSSSHIKIGD |
| | | KVRVKASVTTPKYKWGSVTHQSVGVVKAFSANGKDIIV |
| | | DFPQQSHWTGLLSEMELVPSIHPGVTCDGCQMFPINGSR |
| | | FKCRNCDDFDFCETCFKTKKHNTRHTFGRINEPGQSAVF |
| | | CGRSGKQLKRCHSSQPGMLLDSWSRMVKSLNVSSSVNQ |
| | | ASRLIDGSEPCWQSSGSQGKHWIRLEIFPDVLVHRLKMIV |
| | | DPADSSYMPSLVVVSGGNSLNNLIELKTININPSDTTVPL |
| | | LNDCTEYHRYIEIAIKQCRSSGIDCKIHGLILLGRIRAEEE |
| | | DLAAVPFLASDNEEEEDEKGNSGSLIRKKAAGLESAATI |
| | | RTKVFVWGLNDKDQLGGLKGSKIKVPSFSETLSALNVV |
| | | QVAGGSKSLFAVTVEGKVYACGEATNGRLGLGISSGTV |
| | | PIPRQITALSSYVVKKVAVHSGGRHATALTVDGKVFSW |
| | | GEGDDGKLGHFSRMNCDKPRLIEALKTKRIRDIACGSSH |
| | | SAALTSSGELYTWGLGEYGRLGHGDNTTQLKPKMVKV |
| | | LLGHRVIQVACGSRDAQTLALTDEGLVFSWGDGDFGKL |
| | | GRGGSEGCNIPQNIERLNGQGVCQIECGAQFSLALTKSG |
| | | VVWTWGKGDYFRLGHGSDVHVRKPQVVEGLRGKKIVH |
| | | VAVGALHCLAVTDSGQVYAWGDNDHGQQGNGTTTVN |
| | | RKPTLVQGLEGQKITRVACGSSHSVAWTTVDVATPSVH |
| | | EPVLFQTARDPLGASYLGVPSDADSSAASNKISGASNSK |
| | | PNRPSLAKILLSLDGNLAKQQALSHILTALQIMYARDAV |
| | | VGALMPAAMIAPVECPSFSSAAPSDASAMASPMNGEEC |
| | | MLAVDIEDRLSPNPWQEKREIVSSEDAVTPSAVTPSAPSA |
| | | SARPFIPVTDDLGAASIIAETMTKTKEDVESQNKAAGPEP |
| | | QALDEFTSLLIADDTRVVVDLLKLSVCSRAGDRGRDVLS |
| | | AVLSGMGTAYPQVADMLLELCVTELEDVATDSQSGRLS |
| | | SQPVVVESSHPYTDDTSTSGTVKIPGAEGLRVEFDRQCST |
| | | ERRHDPLTVMDGVNRIVSVRSGREWSDWSSELRIPGDEL |
| | | KWKFISDGSVNGWGWRFTVYPIMPAAGPKELLSDRCVL |
| | | SCPSMDLVTCLLDFRLNLASNRSIVPRLAASLAACAQLS |
| | | ALAASHRMWALQRLRKLLTTEFGQSININRLLGENDGET |
| | | RALSFTGSALAALVKGLPEALQRQFEYEDPIVRGGKQLL |
| | | HSPFFKVLVALACDLELDTLPCCAETHKWAWFRRYCMA |
| | | SRVAVALDKRTPLPRLFLDEVAKKIRELMADSENMDVL |
| | | HESHDIFKREQDEQLVQWMNRRPDDWTLSAGGSGTIYG |
| | | WGHNHRGQLGGIEGAKVKVPTPCEALATLRPVQLIGGE |
| | | QTLFAVTADGKLYATGYGAGGRLGIGGTESVSTPTLLES |
| | | IQHVFIKKVAVNSGGKHCLALSSEGEVYSWGEAEDGKL |
| | | GHGNRSPCDRPRVIESLRGIEVVDVAAGGAHSACVTAA |
| | | GDLYTWGKGRYGRLGHSDSEDQLKPKLVEALQGHRVV |
| | | DIACGSGDAQTLCLTDDDTVWSWGDGDYGKLGRGGSD |
| | | GCKVPMKIDSLTGLGVVKVECGSQFSVALTKSGAVYTW |
| | | GKGDYHRLGHGSDDHVRRPRQVQGLQGKKVIAIATGSL |
| | | HCVCCTEDGEVYTWGDNDEGQLGDGTTNAIQRPRLVA |
| | | ALQGKKVNRVACGSAHTLAWSTSKPASAGKLPAQVPM |
| | | EYNHLQEIPIIALRNRLLLLHHLSELFCPCIPMEDLEGSLD |
| | | ETGLGPSVGFDTLRGILISQGKEAAFRKVVQATMVRDRQ |
| | | HGPVVELNRIQVKRSRSKGGLAGPDGTKSVFGQMCAK |
| | | MSSFGPDSLLLPHRVWKVKFVGESVDDCGGGYSESIAEI |
| | | CEELQNGLTPLLIVTPNGRDESGANRDCYLLSPAARAPV |
| | | HSSMFRFLGVLLGIAIRTGSPLSLNLAEPVWKQLAGMSL |
| | | TIADLSEVDKDFIPGLMYIRDNEATSEEFEAMSLPFTVPS |
| | | ASGQDIQLSSKHTHITLDNRAEYVRLAINYRLHEFDEQV |
| | | AAVREGMARVVPVPLLSLFTGYELETMVCGSPDIPLHLL |
| | | KSVATYKGIEPSASLIQWFWEVMESFSNTERSLFLRFVW |
| | | GRTRLPRTIADFRGRDFVIQVLDKYNPPDHFLPESYTCFF |
| | | LLKLPRYSCKQVLEEKLKYAIHFCKSIDTDDYARIALTGE |
| | | PAADDSSDDSDNEDVDSFASDSTQDYLTGH |
| 99 | BIN1 (SH3_9) | MAEMGSKGVTAGKIASNVQKKLTRAQEKVLQKLGKAD |
| | | ETKDEQFEQCVQNFNKQLTEGTRLQKDLRTYLASVKAM |
| | | HEASKKLNECLQEVYEPDWPGRDEANKIAENNDLLWM |
| | | DYHQKLVDQALLTMDTYLGQFPDIKSRIAKRGRKLVDY |
| | | DSARHHYESLQTAKKKDEAKIAKPVSLLEKAAPQWCQG |
| | | KLQAHLVAQTNLLRNQAEEELIKAQKVFEEMNVDLQEE |
| | | LPSLWNSRVGFYVNTFQSIAGLEENFHKEMSKLNQNLN |
| | | DVLVGLEKQHGSNTFTVKAQPSDNAPAKGNKSPSPPDG |
| | | SPAATPEIRVNHEPEPAGGATPGATLPKSPSQLRKGPPVP |
| | | PPPKHTPSKEVKQEQILSLFEDTFVPEISVTTPSQFEAPGPF |
| | | SEQASLLDLDFDPLPPVTSPVKAPTPSGQSIPWDLWEPTE |
| | | SPAGSLPSGEPSAAEGTFAVSWPSQTAEPGPAQPAEASE |
| | | VAGGTQPAAGAQEPGETAASEAASSSLPAVVVETFPATV |
| | | NGTVEGGSGAGRLDLPPGFMFKVQAQHDYTATDTDELQ |
| | | LKAGDVVLVIPFQNPEEQDEGWLMGVKESDWNQHKEL |
| | | EKCRGVFPENFTERVP |
| 100 | PCGF2 (RING | MHRTTRIKITELNPHLMCALCGGYFIDATTIVECLHSFCK |
| | finger protein | TCIVRYLETNKYCPMCDVQVHKTRPLLSIRSDKTLQDIV |
| | domain) | YKLVPGLFKDEMKRRRDFYAAYPLTEVPNGSNEDRGEV |
| | | LEQEKGALSDDEIVSLSIEFYEGARDRDEKKGPLENGDG |
| | | DKEKTGVRFLRCPAAMTVMHLAKFLRNKMDVPSKYKV |
| | | EVLYEDEPLKEYYTLMDIAYIYPWRRNGPLPLKYRVQPA |
| | | CKRLTLATVPTPSEGTNTSGASECESVSDKAPSPATLPAT |
| | | SSSLPSPATPSHGSPSSHGPPATHPTSPTPPSTASGATTAA |
| | | NGGSLNCLQTPSSTSRGRKMTVNGAPVPPLT |
| 101 | TOX (HMG box) | MDVRFYPPPAQPAAAPDAPCLGPSPCLDPYYCNKEDGE |
| | | NMYMSMTEPSQDYVPASQSYPGPSLESEDFNIPPITPPSL |
| | | PDHSLVHLNEVESGYHSLCHPMNHNGLLPFHPQNMDLP |
| | | EITVSNMLGQDGTLLSNSISVMPDIRNPEGTQYSSHPQM |
| | | AAMRPRGQPADIRQQPGMMPHGQLTTINQSQLSAQLGL |
| | | NMGGSNVPHNSPSPPGSKSATPSPSSSVHEDEGDDTSKIN |
| | | GGEKRPASDMGKKPKTPKKKKKKDPNEPQKPVSAYALF |
| | | FRDTQAAIKGQNPNATFGEVSKIVASMWDGLGEEQKQV |
| | | YKKKTEAAKKEYLKQLAAYRASLVSKSYSEPVDVKTSQ |
| | | PPQLINSKPSVFHGPSQAHSALYLSSHYHQQPGMNPHLT |
| | | AMHPSLPRNIAPKPNNQMPVTVSIANMAVSPPPPLQISPP |
| | | LHQHLNMQQHQPLTMQQPLGNQLPMQVQSALHSPTMQ |
| | | QGFTLQPDYQTIINPTSTAAQVVTQAMEYVRSGCRNPPP |
| | | QPVDWNNDYCSSGGMQRDKALYLT |
| 102 | FOXA1 (HNF3A | MLGTVKMEGHETSDWNSYYADTQEAYSSVPVSNMNSG |
| | C-terminal | LGSMNSMNTYMTMNTMTTSGNMTPASFNMSYANPGLG |
| | domain) | AGLSPGAVAGMPGGSAGAMNSMTAAGVTAMGTALSPS |
| | | GMGAMGAQQAASMNGLGPYAAAMNPCMSPMAYAPSN |
| | | LGRSRAGGGGDAKTFKRSYPHAKPPYSYISLITMAIQQA |
| | | PSKMLTLSEIYQWIMDLFPYYRQNQQRWQNSIRHSLSFN |
| | | DCFVKVARSPDKPGKGSYWTLHPDSGNMFENGCYLRR |
| | | QKRFKCEKQPGAGGGGGSGSGGSGAKGGPESRKDPSGA |
| | | SNPSADSPLHRGVHGKTGQLEGAPAPGPAASPQTLDHSG |
| | | ATATGGASELKTPASSTAPPISSGPGALASVPASHPAHGL |
| | | APHESQLHLKGDPHYSFNHPFSINNLMSSSEQQHKLDFK |
| | | AYEQALQYSPYGSTLPASLPLGSASVTTRSPIEPSALEPA |
| | | YYQGVYSRPVLNTS |
| 103 | FOXA2 (HNF3B | MLGAVKMEGHEPSDWSSYYAEPEGYSSVSNMNAGLGM |
| | C-terminal | NGMNTYMSMSAAAMGSGSGNMSAGSMNMSSYVGAG |
| | domain) | MSPSLAGMSPGAGAMAGMGGSAGAAGVAGMGPHLSPS |
| | | LSPLGGQAAGAMGGLAPYANMNSMSPMYGQAGLSRAR |
| | | DPKTYRRSYTHAKPPYSYISLITMAIQQSPNKMLTLSEIY |
| | | QWIMDLFPFYRQNQQRWQNSIRHSLSFNDCFLKVPRSPD |
| | | KPGKGSFWTLHPDSGNMFENGCYLRRQKRFKCEKQLAL |
| | | KEAAGAAGSGKKAAAGAQASQAQLGEAAGPASETPAG |
| | | TESPHSSASPCQEHKRGGLGELKGTPAAALSPPEPAPSPG |
| | | QQQQAAAHLLGPPHHPGLPPEAHLKPEHHYAFNHPFSIN |
| | | NLMSSEQQHHHSHHHHQPHKMDLKAYEQVMHYPGYG |
| | | SPMPGSLAMGPVTNKTGLDASPLAADTSYYQGVYSRPI |
| | | MNSS |
| 104 | IRF2BP1 (IRF- | MASVQASRRQWCYLCDLPKMPWAMVWDFSEAVCRGC |
| | 2BP1_2 N- | VNFEGADRIELLIDAARQLKRSHVLPEGRSPGPPALKHPA |
| | terminal domain) | TKDLAAAAAQGPQLPPPQAQPQPSGTGGGVSGQDRYDR |
| | | ATSSGRLPLPSPALEYTLGSRLANGLGREEAVAEGARRA |
| | | LLGSMPGLMPPGLLAAAVSGLGSRGLTLAPGLSPARPLF |
| | | GSDFEKEKQQRNADCLAELNEAMRGRAEEWHGRPKAV |
| | | REQLLALSACAPFNVRFKKDHGLVGRVFAFDATARPPG |
| | | YEFELKLFTEYPCGSGNVYAGVLAVARQMFHDALREPG |
| | | KALASSGFKYLEYERRHGSGEWRQLGELLTDGVRSFREP |
| | | APAEALPQQYPEPAPAALCGPPPRAPSRNLAPTPRRRKA |
| | | SPEPEGEAAGKMTTEEQQQRHWVAPGGPYSAETPGVPS |
| | | PIAALKNVAEALGHSPKDPGGGGGPVRAGGASPAASST |
| | | AQPPTQHRLVARNGEAEVSPTAGAEAVSGGGSGTGATP |
| | | GAPLCCTLCRERLEDTHFVQCPSVPGHKFCFPCSREFIKA |
| | | QGPAGEVYCPSGDKCPLVGSSVPWAFMQGEIATILAGDI |
| | | KVKKERDP |
| 105 | IRF2BP2 (IRF- | MAAAVAVAAASRRQSCYLCDLPRMPWAMIWDFTEPVC |
| | 2BP1_2 N- | RGCVNYEGADRVEFVIETARQLKRAHGCFPEGRSPPGA |
| | terminal domain) | AASAAAKPPPLSAKDILLQQQQQLGHGGPEAAPRAPQAL |
| | | ERYPLAAAAERPPRLGSDFGSSRPAASLAQPPTPQPPPVN |
| | | GILVPNGFSKLEEPPELNRQSPNPRRGHAVPPTLVPLMNG |
| | | SATPLPTALGLGGRAAASLAAVSGTAAASLGSAQPTDLG |
| | | AHKRPASVSSSAAVEHEQREAAAKEKQPPPPAHRGPAD |
| | | SLSTAAGAAELSAEGAGKSRGSGEQDWVNRPKTVRDTL |
| | | LALHQHGHSGPFESKFKKEPALTAGRLLGFEANGANGS |
| | | KAVARTARKRKPSPEPEGEVGPPKINGEAQPWLSTSTEG |
| | | LKIPMTPTSSFVSPPPPTASPHSNRTTPPEAAQNGQSPMA |
| | | ALILVADNAGGSHASKDANQVHSTTRRNSNSPPSPSSMN |
| | | QRRLGPREVGGQGAGNTGGLEPVHPASLPDSSLATSAPL |
| | | CCTLCHERLEDTHFVQCPSVPSHKFCFPCSRQSIKQQGAS |
| | | GEVYCPSGEKCPLVGSNVPWAFMQGEIATILAGDVKVK |
| | | KERDS |
| 106 | IRF2BPL IRF- | MSAAQVSSSRRQSCYLCDLPRMPWAMIWDFSEPVCRGC |
| | 2BP1_2 N- | VNYEGADRIEFVIETARQLKRAHGCFQDGRSPGPPPPVG |
| | terminal domain | VKTVALSAKEAAAAAAAAAAAAAAAQQQQQQQQQQQ |
| | | QQQQQQQQQQQQQQLNHVDGSSKPAVLAAPSGLERYG |
| | | LSAAAAAAAAAAAAVEQRSRFEYPPPPVSLGSSSHTARL |
| | | PNGLGGPNGFPKPTPEEGPPELNRQSPNSSSAAASVASRR |
| | | GTHGGLVTGLPNPGGGGGPQLTVPPNLLPQTLLNGPASA |
| | | AVLPPPPPHALGSRGPPTPAPPGAPGGPACLGGTPGVSAT |
| | | SSSASSSTSSSVAEVGVGAGGKRPGSVSSTDQERELKEK |
| | | QRNAEALAELSESLRNRAEEWASKPKMVRDTLLTLAGC |
| | | TPYEVRFKKDHSLLGRVFAFDAVSKPGMDYELKLFIEYP |
| | | TGSGNVYSSASGVAKQMYQDCMKDFGRGLSSGFKYLE |
| | | YEKKHGSGDWRLLGDLLPEAVRFFKEGVPGADMLPQPY |
| | | LDASCPMLPTALVSLSRAPSAPPGTGALPPAAPSGRGAA |
| | | ASLRKRKASPEPPDSAEGALKLGEEQQRQQWMANQSEA |
| | | LKLTMSAGGFAAPGHAAGGPPPPPPPLGPHSNRTTPPES |
| | | APQNGPSPMAALMSVADTLGTAHSPKDGSSVHSTTASA |
| | | RRNSSSPVSPASVPGQRRLASRNGDLNLQVAPPPPSAHP |
| | | GMDQVHPQNIPDSPMANSGPLCCTICHERLEDTHFVQCP |
| | | SVPSHKFCFPCSRESIKAQGATGEVYCPSGEKCPLVGSNV |
| | | PWAFMQGEIATILAGDVKVKKERDP |
| 107 | HOXA13 | MTASVLLHPRWIEPTVMFLYDNGGGLVADELNKNMEG |
| | (homeodomain) | AAAAAAAAAAAAAAGAGGGGFPHPAAAAAGGNESVA |
| | | AAAAAAAAAAANQCRNLMAHPAPLAPGAASAYSSAPG |
| | | EAPPSAAAAAAAAAAAAAAAAAASSSGGPGPAGPAGA |
| | | EAAKQCSPCSAAAQSSSGPAALPYGYFGSGYYPCARMG |
| | | PHPNAIKSCAQPASAAAAAAFADKYMDTAGPAAEEFSS |
| | | RAKEFAFYHQGYAAGPYHHHQPMPGYLDMPVVPGLGG |
| | | PGESRHEPLGLPMESYQPWALPNGWNGQMYCPKEQAQ |
| | | PPHLWKSTLPDVVSHPSDASSYRRGRKKRVPYTKVQLK |
| | | ELEREYATNKFITKDKRRRISATTNLSERQVTIWFQNRRV |
| | | KEKKVINKLKTTS |
| 108 | HOXB13 | MEPGNYATLDGAKDIEGLLGAGGGRNLVAHSPLTSHPA |
| | (homeodomain) | APTLMPAVNYAPLDLPGSAEPPKQCHPCPGVPQGTSPAP |
| | | VPYGYFGGGYYSCRVSRSSLKPCAQAATLAAYPAETPT |
| | | AGEEYPSRPTEFAFYPGYPGTYQPMASYLDVSVVQTLG |
| | | APGEPRHDSLLPVDSYQSWALAGGWNSQMCCQGEQNP |
| | | PGPFWKAAFADSSGQHPPDACAFRRGRKKRIPYSKGQL |
| | | RELEREYAANKFITKDKRRKISAATSLSERQITIWFQNRR |
| | | VKEKKVLAKVKNSATP |
| 109 | HOXC13 | MTTSLLLHPRWPESLMYVYEDSAAESGIGGGGGGGGGG |
| | (homeodomain) | TGGAGGGCSGASPGKAPSMDGLGSSCPASHCRDLLPHP |
| | | VLGRPPAPLGAPQGAVYTDIPAPEAARQCAPPPAPPTSSS |
| | | ATLGYGYPFGGSYYGCRLSHNVNLQQKPCAYHPGDKYP |
| | | EPSGALPGDDLSSRAKEFAFYPSFASSYQAMPGYLDVSV |
| | | VPGISGHPEPRHDALIPVEGYQHWALSNGWDSQVYCSK |
| | | EQSQSAHLWKSPFPDVVPLQPEVSSYRRGRKKRVPYTK |
| | | VQLKELEKEYAASKFITKEKRRRISATTNLSERQVTIWFQ |
| | | NRRVKEKKVVSKSKAPHLHST |
| 110 | HOXA11 | MDFDERGPCSSNMYLPSCTYYVSGPDFSSLPSFLPQTPSS |
| | (homeodomain) | RPMTYSYSSNLPQVQPVREVTFREYAIEPATKWHPRGNL |
| | | AHCYSAEELVHRDCLQAPSAAGVPGDVLAKSSANVYHH |
| | | PTPAVSSNFYSTVGRNGVLPQAFDQFFETAYGTPENLAS |
| | | SDYPGDKSAEKGPPAATATSAAAAAAATGAPATSSSDS |
| | | GGGGGCRETAAAAEEKERRRRPESSSSPESSSGHTEDKA |
| | | GGSSGQRTRKKRCPYTKYQIRELEREFFFSVYINKEKRLQ |
| | | LSRMLNLTDRQVKIWFQNRRMKEKKINRDRLQYYSANP |
| | | LL |
| 111 | HOXC11 | MFNSVNLGNFCSPSRKERGADFGERGSCASNLYLPSCTY |
| | (homeodomain) | YMPEFSTVSSFLPQAPSRQISYPYSAQVPPVREVSYGLEP |
| | | SGKWHHRNSYSSCYAAADELMHRECLPPSTVTEILMKN |
| | | EGSYGGHHHPSAPHATPAGFYSSVNKNSVLPQAFDRFFD |
| | | NAYCGGGDPPAEPPCSGKGEAKGEPEAPPASGLASRAEA |
| | | GAEAEAEEENTNPSSSGSAHSVAKEPAKGAAPNAPRTRK |
| | | KRCPYSKFQIRELEREFFENVYINKEKRLQLSRMLNLTDR |
| | | QVKIWFQNRRMKEKKLSRDRLQYFSGNPLL |
| 112 | HOXC10 | MTCPRNVTPNSYAEPLAAPGGGERYSRSAGMYMQSGSD |
| | (homeodomain) | FNCGVMRGCGLAPSLSKRDEGSSPSLALNTYPSYLSQLD |
| | | SWGDPKAAYRLEQPVGRPLSSCSYPPSVKEENVCCMYS |
| | | AEKRAKSGPEAALYSHPLPESCLGEHEVPVPSYYRASPS |
| | | YSALDKTPHCSGANDFEAPFEQRASLNPRAEHLESPQLG |
| | | GKVSFPETPKSDSQTPSPNEIKTEQSLAGPKGSPSESEKER |
| | | AKAADSSPDTSDNEAKEEIKAENTTGNWLTAKSGRKKR |
| | | CPYTKHQTLELEKEFLFNMYLTRERRLEISKTINLTDRQV |
| | | KIWFQNRRMKLKKMNRENRIRELTSNFNFT |
| 113 | HOXA10 | MSARKGYLLPSPNYPTTMSCSESPAANSFLVDSLISSGRG |
| | (homeodomain) | EAGGGGGGAGGGGGGGYYAHGGVYLPPAADLPYGLQS |
| | | CGLFPTLGGKRNEAASPGSGGGGGGLGPGAHGYGPSPID |
| | | LWLDAPRSCRMEPPDGPPPPPQQQPPPPPQPPQPAPQATS |
| | | CSFAQNIKEESSYCLYDSADKCPKVSATAAELAPFPRGPP |
| | | PDGCALGTSSGVPVPGYFRLSQAYGTAKGYGSGGGGAQ |
| | | QLGAGPFPAQPPGRGFDLPPALASGSADAARKERALDSP |
| | | PPPTLACGSGGGSQGDEEAHASSSAAEELSPAPSESSKAS |
| | | PEKDSLGNSKGENAANWLTAKSGRKKRCPYTKHQTLEL |
| | | EKEFLFNMYLTRERRLEISRSVHLTDRQVKIWFQNRRMK |
| | | LKKMNRENRIRELTANFNFS |
| 114 | HOXB9 | MSISGTLSSYYVDSIISHESEDAPPAKFPSGQYASSRQPGH |
| | (homeodomain) | AEHLEFPSCSFQPKAPVFGASWAPLSPHASGSLPSVYHPY |
| | | IQPQGVPPAESRYLRTWLEPAPRGEAAPGQGQAAVKAEP |
| | | LLGAPGELLKQGTPEYSLETSAGREAVLSNQRPGYGDNK |
| | | ICEGSEDKERPDQTNPSANWLHARSSRKKRCPYTKYQTL |
| | | ELEKEFLFNMYLTRDRRHEVARLLNLSERQVKIWFQNR |
| | | RMKMKKMNKEQGKE |
| 115 | HOXA9 | MATTGALGNYYVDSFLLGADAADELSVGRYAPGTLGQP |
| | (homeodomain) | PRQAATLAEHPDFSPCSFQSKATVEGASWNPVHAAGAN |
| | | AVPAAVYHHHHHHPYVHPQAPVAAAAPDGRYMRSWL |
| | | EPTPGALSFAGLPSSRPYGIKPEPLSARRGDCPTLDTHTLS |
| | | LTDYACGSPPVDREKQPSEGAFSENNAENESGGDKPPID |
| | | PNNPAANWLHARSTRKKRCPYTKHQTLELEKEFLENMY |
| | | LTRDRRYEVARLLNLTERQVKIWFQNRRMKMKKINKDR |
| | | AKDE |
| 116 | ZFP28_HUMAN | NKKLEAVGTGIEPKAMSQGLVTFGDVAVDFSQEEWEWL |
| | | NPIQRNLYRKVMLENYRNLASLGLCVSKPDVISSLEQGK |
| | | EPW |
| 117 | ZN334_HUMAN | KMKKFQIPVSFQDLTVNFTQEEWQQLDPAQRLLYRDVM |
| | | LENYSNLVSVGYHVSKPDVIFKLEQGEEPWIVEEFSNQN |
| | | YPD |
| 118 | ZN568_HUMAN | CSQESALSEEEEDTTRPLETVTFKDVAVDLTQEEWEQMK |
| | | PAQRNLYRDVMLENYSNLVTVGCQVTKPDVIFKLEQEE |
| | | EPW |
| 119 | ZN37A_HUMAN | ITSQGSVSFRDVTVGFTQEEWQHLDPAQRTLYRDVMLE |
| | | NYSHLVSVGYCIPKPEVILKLEKGEEPWILEEKFPSQSHL |
| | | EL |
| 120 | ZN181_HUMAN | PQVTFNDVAIDFTHEEWGWLSSAQRDLYKDVMVQNYE |
| | | NLVSVAGLSVTKPYVITLLEDGKEPWMMEKKLSKGMIP |
| | | DWESR |
| 121 | ZN510_HUMAN | PLRFSTLFQEQQKMNISQASVSFKDVTIEFTQEEWQQMA |
| | | PVQKNLYRDVMLENYSNLVSVGYCCFKPEVIFKLEQGE |
| | | EPW |
| 122 | ZN862_HUMAN | QDPSAEGLSEEVPVVFEELPVVFEDVAVYFTREEWGML |
| | | DKRQKELYRDVMRMNYELLASLGPAAAKPDLISKLERR |
| | | AAPW |
| 123 | ZN140_HUMAN | SQGSVTFRDVAIDFSQEEWKWLQPAQRDLYRCVMLENY |
| | | GHLVSLGLSISKPDVVSLLEQGKEPWLGKREVKRDLFSV |
| | | SES |
| 124 | ZN208_HUMAN | GSLTFRDVAIEFSLEEWQCLDTAQQNLYRNVMLENYRN |
| | | LVFLGIAAFKPDLIIFLEEGKESWNMKRHEMVEESPVICS |
| | | HF |
| 125 | ZN248_HUMAN | NKSQEQVSFKDVCVDFTQEEWYLLDPAQKILYRDVILEN |
| | | YSNLVSVGYCITKPEVIFKIEQGEEPWILEKGFPSQCHPER |
| 126 | ZN571_HUMAN | PHLLVTFRDVAIDFSQEEWECLDPAQRDLYRDVMLENY |
| | | SNLISLDLESSCVTKKLSPEKEIYEMESLQWENMGKRINH |
| | | HL |
| 127 | ZN699_HUMAN | EEERKTAELQKNRIQDSVVFEDVAVDFTQEEWALLDLA |
| | | QRNLYRDVMLENFQNLASLGYPLHTPHLISQWEQEEDL |
| | | QTVK |
| 128 | ZN726_HUMAN | GLLTFRDVAIEFSLEEWQCLDTAQKNLYRNVMLENYRN |
| | | LAFLGIAVSKPDLIICLEKEKEPWNMKRDEMVDEPPGICP |
| | | HF |
| 129 | ZIK1_HUMAN | RAPTQVTVSPETHMDLTKGCVTFEDIAIYFSQDEWGLLD |
| | | EAQRLLYLEVMLENFALVASLGCGHGTEDEETPSDQNV |
| | | SVG |
| 130 | ZNF2_HUMAN | AAVSPTTRCQESVTFEDVAVVFTDEEWSRLVPIQRDLYK |
| | | EVMLENYNSIVSLGLPVPQPDVIFQLKRGDKPWMVDLH |
| | | GSE |
| 131 | Z705F_HUMAN | HSLEKVTFEDVAIDFTQEEWDMMDTSKRKLYRDVMLE |
| | | NISHLVSLGYQISKSYIILQLEQGKELWREGRVFLQDQNP |
| | | DRE |
| 132 | ZNF14_HUMAN | DSVSFEDVAVNFTLEEWALLDSSQKKLYEDVMQETFKN |
| | | LVCLGKKWEDQDIEDDHRNQGKNRRCHMVERLCESRR |
| | | GSKCG |
| 133 | ZN471_HUMAN | NVEVVKVMPQDLVTFKDVAIDFSQEEWQWMNPAQKRL |
| | | YRSMMLENYQSLVSLGLCISKPYVISLLEQGREPWEMTS |
| | | EMTR |
| 134 | ZN624_HUMAN | TQPDEDLHLQAEETQLVKESVTFKDVAIDFTLEEWRLM |
| | | DPTQRNLHKDVMLENYRNLVSLGLAVSKPDMISHLENG |
| | | KGPW |
| 135 | ZNF84_HUMAN | TMLQESFSFDDLSVDFTQKEWQLLDPSQKNLYKDVMLE |
| | | NYSSLVSLGYEVMKPDVIFKLEQGEEPWVGDGEIPSSDS |
| | | PEV |
| 136 | ZNF7_HUMAN | EVVTFGDVAVHFSREEWQCLDPGQRALYREVMLENHSS |
| | | VAGLAGFLVFKPELISRLEQGEEPWVLDLQGAEGTEAPR |
| | | TSK |
| 137 | ZN891_HUMAN | RNAEEERMIAVFLTTWLQEPMTFKDVAVEFTQEEWMM |
| | | LDSAQRSLYRDVMLENYRNLTSVEYQLYRLTVISPLDQE |
| | | EIRN |
| 138 | ZN337_HUMAN | GPQGARRQAFLAFGDVTVDFTQKEWRLLSPAQRALYRE |
| | | VTLENYSHLVSLGILHSKPELIRRLEQGEVPWGEERRRRP |
| | | GP |
| 139 | Z705G_HUMAN | HSLKKLTFEDVAIDFTQEEWAMMDTSKRKLYRDVMLE |
| | | NISHLVSLGYQISKSYIILQLEQGKELWREGRVFLQDQNP |
| | | NRE |
| 140 | ZN529_HUMAN | MPEVEFPDQFFTVLTMDHELVTLRDVVINFSQEEWEYLD |
| | | SAQRNLYWDVMMENYSNLLSLDLESRNETKHLSVGKDI |
| | | IQN |
| 141 | ZN729_HUMAN | PGAPGSLEMGPLTFRDVTIEFSLEEWQCLDTVQQNLYRD |
| | | VMLENYRNLVFLGMAVFKPDLITCLKQGKEPWNMKRH |
| | | EMVT |
| 142 | ZN419_HUMAN | RDPAQVPVAADLLTDHEEGYVTFEDVAVYFSQEEWRLL |
| | | DDAQRLLYRNVMLENFTLLASLGLASSKTHEITQLESWE |
| | | EPF |
| 143 | Z705A_HUMAN | HSLKKVTFEDVAIDFTQEEWAMMDTSKRKLYRDVMLE |
| | | NISHLVSLGYQISKSYIILQLEQGKELWREGREFLQDQNP |
| | | DRE |
| 144 | ZNF45_HUMAN | TKSKEAVTFKDVAVVFSEEELQLLDLAQRKLYRDVMLE |
| | | NFRNVVSVGHQSTPDGLPQLEREEKLWMMKMATQRDN |
| | | SSGAK |
| 145 | ZN302_HUMAN | SQVTFSDVAIDFSHEEWACLDSAQRDLYKDVMVQNYEN |
| | | LVSVGLSVTKPYVIMLLEDGKEPWMMEKKLSKAYPFPL |
| | | SHSV |
| 146 | ZN486_HUMAN | PGPLRSLEMESLQFRDVAVEFSLEEWHCLDTAQQNLYR |
| | | DVMLENYRHLVFLGIIVSKPDLITCLEQGIKPLTMKRHE |
| | | MIA |
| 147 | ZN621_HUMAN | LQTTWPQESVTFEDVAVYFTQNQWASLDPAQRALYGEV |
| | | MLENYANVASLVAFPFPKPALISHLERGEAPWGPDPWD |
| | | TEIL |
| 148 | ZN688_HUMAN | APLLAPRPGETRPGCRKPGTVSFADVAVYFSPEEWGCLR |
| | | PAQRALYRDVMQETYGHLGALGFPGPKPALISWMEQES |
| | | EAW |
| 149 | ZN33A_HUMAN | NKVEQKSQESVSFKDVTVGFTQEEWQHLDPSQRALYRD |
| | | VMLENYSNLVSVGYCVHKPEVIFRLQQGEEPWKQEEEF |
| | | PSQS |
| 150 | ZN554_HUMAN | CFSQEERMAAGYLPRWSQELVTFEDVSMDFSQEEWELL |
| | | EPAQKNLYREVMLENYRNVVSLEALKNQCTDVGIKEGP |
| | | LSPA |
| 151 | ZN878_HUMAN | DSVAFEDVAVNFTQEEWALLDPSQKNLYREVMQETLRN |
| | | LTSIGKKWNNQYIEDEHQNPRRNLRRLIGERLSESKESHQ |
| | | HG |
| 152 | ZN772_HUMAN | MGPAQVPMNSEVIVDPIQGQVNFEDVFVYFSQEEWVLL |
| | | DEAQRLLYRDVMLENFALMASLGHTSFMSHIVASLVMG |
| | | SEPW |
| 153 | ZN224_HUMAN | TTFKEAMTFKDVAVVFTEEELGLLDLAQRKLYRDVMLE |
| | | NFRNLLSVGHQAFHRDTFHFLREEKIWMMKTAIQREGN |
| | | SGDK |
| 154 | ZN184_HUMAN | DSTLLQGGHNLLSSASFQEAVTFKDVIVDFTQEEWKQLD |
| | | PGQRDLFRDVTLENYTHLVSIGLQVSKPDVISQLEQGTEP |
| | | W |
| 155 | ZN544_HUMAN | EARSMLVPPQASVCFEDVAMAFTQEEWEQLDLAQRTLY |
| | | REVTLETWEHIVSLGLFLSKSDVISQLEQEEDLCRAEQEA |
| | | PR |
| 156 | ZNF57_HUMAN | DSVVFEDVAVDFTLEEWALLDSAQRDLYRDVMLETFRN |
| | | LASVDDGTQFKANGSVSLQDMYGQEKSKEQTIPNFTGN |
| | | NSCA |
| 157 | ZN283_HUMAN | EESHGALISSCNSRTMTDGLVTFRDVAIDFSQEEWECLDP |
| | | AQRDLYVDVMLENYSNLVSLDLESKTYETKKIFSENDIF |
| | | E |
| 158 | ZN549_HUMAN | VITPQIPMVTEEFVKPSQGHVTFEDIAVYFSQEEWGLLDE |
| | | AQRCLYHDVMLENFSLMASVGCLHGIEAEEAPSEQTLSA |
| | | Q |
| 159 | ZN211_HUMAN | VQLRPQTRMATALRDPASGSVTFEDVAVYFSWEEWDLL |
| | | DEAQKHLYFDVMLENFALTSSLGCWCGVEHEETPSEQRI |
| | | SGE |
| 160 | ZN615_HUMAN | MQAQESLTLEDVAVDFTWEEWQFLSPAQKDLYRDVML |
| | | ENYSNLVAVGYQASKPDALSKLERGEETCTTEDEIYSRIC |
| | | SEI |
| 161 | ZN253_HUMAN | GPLQFRDVAIEFSLEEWHCLDTAQRNLYRDVMLENYRN |
| | | LVFLGIVVSKPDLVTCLEQGKKPLTMERHEMIAKPPVMS |
| | | SHF |
| 162 | ZN226_HUMAN | NMFKEAVTFKDVAVAFTEEELGLLGPAQRKLYRDVMV |
| | | ENFRNLLSVGHPPFKQDVSPIERNEQLWIMTTATRRQGN |
| | | LGEK |
| 163 | ZN730_HUMAN | GALTFRDVAIEFSLEEWQCLDTEQQNLYRNVMLDNYRN |
| | | LVFLGIAVSKPDLITCLEQEKEPWNLKTHDMVAKPPVICS |
| | | HI |
| 164 | Z585A_HUMAN | SPQKSSALAPEDHGSSYEGSVSFRDVAIDFSREEWRHLD |
| | | PSQRNLYRDVMLETYSHLLSVGYQVPEAEVVMLEQGKE |
| | | PWA |
| 165 | ZN732_HUMAN | ELLTFRDVAIEFSPEEWKCLDPAQQNLYRDVMLENYRN |
| | | LISLGVAISNPDLVIYLEQRKEPYKVKIHETVAKHPAVCS |
| | | HF |
| 166 | ZN681_HUMAN | EPLKFRDVAIEFSLEEWQCLDTIQQNLYRNVMLENYRNL |
| | | VFLGIVVSKPDLITCLEQEKEPWTRKRHRMVAEPPVICSH |
| | | F |
| 167 | ZN667_HUMAN | PSARGKSKSKAPITFGDLAIYFSQEEWEWLSPIQKDLYED |
| | | VMLENYRNLVSLGLSFRRPNVITLLEKGKAPWMVEPVR |
| | | RR |
| 168 | ZN649_HUMAN | TKAQESLTLEDVAVDFTWEEWQFLSPAQKDLYRDVMLE |
| | | NYSNLVSVGYQAGKPDALTKLEQGEPLWTLEDEIHSPA |
| | | HPEI |
| 169 | ZN470_HUMAN | SQEEVEVAGIKLCKAMSLGSVTFTDVAIDFSQDEWEWL |
| | | NLAQRSLYKKVMLENYRNLVSVGLCISKPDVISLLEQEK |
| | | DPW |
| 170 | ZN484_HUMAN | TKSLESVSFKDVTVDFSRDEWQQLDLAQKSLYREVMLE |
| | | NYFNLISVGCQVPKPEVIFSLEQEEPCMLDGEIPSQSRPD |
| | | GD |
| 171 | ZN431_HUMAN | SGCPGAERNLLVYSYFEKETLTFRDVAIEFSLEEWECLNP |
| | | AQQNLYMNVMLENYKNLVFLGVAVSKQDPVTCLEQEK |
| | | EPW |
| 172 | ZN382_HUMAN | PLQGSVSFKDVTVDFTQEEWQQLDPAQKALYRDVMLE |
| | | NYCHFVSVGFHMAKPDMIRKLEQGEELWTQRIFPSYSYL |
| | | EEDG |
| 173 | ZN254_HUMAN | PGPPRSLEMGLLTFRDVAIEFSLEEWQHLDIAQQNLYRN |
| | | VMLENYRNLAFLGIAVSKPDLITCLEQGKEPWNMKRHE |
| | | MVD |
| 174 | ZN124_HUMAN | SGHPGSWEMNSVAFEDVAVNFTQEEWALLDPSQKNLY |
| | | RDVMQETFRNLASIGNKGEDQSIEDQYKNSSRNLRHIISH |
| | | SGN |
| 175 | ZN607_HUMAN | SYGSITFGDVAIDFSHQEWEYLSLVQKTLYQEVMMENY |
| | | DNLVSLAGHSVSKPDLITLLEQGKEPWMIVREETRGECT |
| | | DLD |
| 176 | ZN317_HUMAN | DLFVCSGLEPHTPSVGSQESVTFQDVAVDFTEKEWPLLD |
| | | SSQRKLYKDVMLENYSNLTSLGYQVGKPSLISHLEQEEE |
| | | PR |
| 177 | ZN620_HUMAN | FQTAWRQEPVTFEDVAVYFTQNEWASLDSVQRALYREV |
| | | MLENYANVASLAFPFTTPVLVSQLEQGELPWGLDPWEP |
| | | MGRE |
| 178 | ZN141_HUMAN | ELLTFRDVAIEFSPEEWKCLDPDQQNLYRDVMLENYRN |
| | | LVSLGVAISNPDLVTCLEQRKEPYNVKIHKIVARPPAMCS |
| | | HF |
| 179 | ZN584_HUMAN | AGEAEAQLDPSLQGLVMFEDVTVYFSREEWGLLNVTQK |
| | | GLYRDVMLENFALVSSLGLAPSRSPVFTQLEDDEQSWVP |
| | | SWV |
| 180 | ZN540_HUMAN | AHALVTFRDVAIDFSQKEWECLDTTQRKLYRDVMLENY |
| | | NNLVSLGYSGSKPDVITLLEQGKEPCVVARDVTGRQCPG |
| | | LLS |
| 181 | ZN75D_HUMAN | KRIKHWKMASKLILPESLSLLTFEDVAVYFSEEEWQLLN |
| | | PLEKTLYNDVMQDIYETVISLGLKLKNDTGNDHPISVSTS |
| | | E |
| 182 | ZN555_HUMAN | DSVVFEDVAVDFTLEEWALLDSAQRDLYRDVMLETFQN |
| | | LASVDDETQFKASGSVSQQDIYGEKIPKESKIATFTRNVS |
| | | WA |
| 183 | ZN658_HUMAN | NMSQASVSFQDVTVEFTREEWQHLGPVERTLYRDVMLE |
| | | NYSHLISVGYCITKPKVISKLEKGEEPWSLEDEFLNQRYP |
| | | GY |
| 184 | ZN684_HUMAN | ISFQESVTFQDVAVDFTAEEWQLLDCAERTLYWDVMLE |
| | | NYRNLISVGCPITKTKVILKVEQGQEPWMVEGANPHESS |
| | | PES |
| 185 | RBAK_HUMAN | NTLQGPVSFKDVAVDFTQEEWQQLDPDEKITYRDVMLE |
| | | NYSHLVSVGYDTTKPNVIIKLEQGEEPWIMGGEFPCQHS |
| | | PEA |
| 186 | ZN829_HUMAN | HPEEEERMHDELLQAVSKGPVMFRDVSIDFSQEEWECL |
| | | DADQMNLYKEVMLENFSNLVSVGLSNSKPAVISLLEQG |
| | | KEPW |
| 187 | ZN582_HUMAN | SLGSELFRDVAIVFSQEEWQWLAPAQRDLYRDVMLETY |
| | | SNLVSLGLAVSKPDVISFLEQGKEPWMVERVVSGGLCPV |
| | | LES |
| 188 | ZN112_HUMAN | TKFQEMVTFKDVAVVFTEEELGLLDSVQRKLYRDVMLE |
| | | NFRNLLLVAHQPFKPDLISQLEREEKLLMVETETPRDGCS |
| | | GR |
| 189 | ZN716_HUMAN | AKRPGPPGSREMGLLTFRDIAIEFSLAEWQCLDHAQQNL |
| | | YRDVMLENYRNLVSLGIAVSKPDLITCLEQNKEPQNIKR |
| | | NE |
| 190 | HKR1_HUMAN | TCMVHRQTMSCSGAGGITAFVAFRDVAVYFTQEEWRLL |
| | | SPAQRTLHREVMLETYNHLVSLEIPSSKPKLIAQLERGEA |
| | | PW |
| 191 | ZN350_HUMAN | IQAQESITLEDVAVDFTWEEWQLLGAAQKDLYRDVMLE |
| | | NYSNLVAVGYQASKPDALFKLEQGEQLWTIEDGIHSGA |
| | | CSDI |
| 192 | ZN480_HUMAN | AQKRRKRKAKESGMALPQGHLTFRDVAIEFSQAEWKCL |
| | | DPAQRALYKDVMLENYRNLVSLGISLPDLNINSMLEQRR |
| | | EPW |
| 193 | ZN416_HUMAN | DSTSVPVTAEAKLMGFTQGCVTFEDVAIYFSQEEWGLLD |
| | | EAQRLLYRDVMLENFALITALVCWHGMEDEETPEQSVS |
| | | VEG |
| 194 | ZNF92_HUMAN | GPLTFRDVKIEFSLEEWQCLDTAQRNLYRDVMLENYRN |
| | | LVFLGIAVSKPDLITWLEQGKEPWNLKRHEMVDKTPVM |
| | | CSHF |
| 195 | ZN100_HUMAN | SGCPGAERSLLVQSYFEKGPLTFRDVAIEFSLEEWQCLDS |
| | | AQQGLYRKVMLENYRNLVFLAGIALTKPDLITCLEQGKE |
| | | P |
| 196 | ZN736_HUMAN | GVLTFRDVAVEFSPEEWECLDSAQQRLYRDVMLENYGN |
| | | LVSLGLAIFKPDLMTCLEQRKEPWKVKRQEAVAKHPAG |
| | | SFHF |
| 197 | ZNF74_HUMAN | KENLEDISGWGLPEARSKESVSFKDVAVDFTQEEWGQL |
| | | DSPQRALYRDVMLENYQNLLALGPPLHKPDVISHLERGE |
| | | EPW |
| 198 | CBX1_HUMAN | EESEKPRGFARGLEPERIIGATDSSGELMFLMKWKNSDE |
| | | ADLVPAKEANVKCPQVVISFYEERLTWHSYPSEDDDKK |
| | | DDK |
| 199 | ZN443_HUMAN | ASVALEDVAVNFTREEWALLGPCQKNLYKDVMQETIRN |
| | | LDCVVMKWKDQNIEDQYRYPRKNLRCRMLERFVESKD |
| | | GTQCG |
| 200 | ZN195_HUMAN | TLLTFRDVAIEFSLEEWKCLDLAQQNLYRDVMLENYRN |
| | | LFSVGLTVCKPGLITCLEQRKEPWNVKRQEAADGHPEM |
| | | GFHH |
| 201 | ZN530_HUMAN | AAALRAPTQQVFVAFEDVAIYFSQEEWELLDEMQRLLY |
| | | RDVMLENFAVMASLGCWCGAVDEGTPSAESVSVEELSQ |
| | | GRTP |
| 202 | ZN782_HUMAN | NTFQASVSFQDVTVEFSQEEWQHMGPVERTLYRDVMLE |
| | | NYSHLVSVGYCFTKPELIFTLEQGEDPWLLEKEKGFLSR |
| | | NSP |
| 203 | ZN791_HUMAN | DSVAFEDVSVSFSQEEWALLAPSQKKLYRDVMQETFKN |
| | | LASIGEKWEDPNVEDQHKNQGRNLRSHTGERLCEGKEG |
| | | SQCA |
| 204 | ZN331_HUMAN | AQGLVTFADVAIDFSQEEWACLNSAQRDLYWDVMLEN |
| | | YSNLVSLDLESAYENKSLPTEKNIHEIRASKRNSDRRSKS |
| | | LGR |
| 205 | Z354C_HUMAN | AVDLLSAQEPVTFRDVAVFFSQDEWLHLDSAQRALYRE |
| | | VMLENYSSLVSLGIPFSMPKLIHQLQQGEDPCMVEREVP |
| | | SDT |
| 206 | ZN157_HUMAN | SPQRFPALIPGEPGRSFEGSVSFEDVAVDFTRQEWHRLDP |
| | | AQRTMHKDVMLETYSNLASVGLCVAKPEMIFKLERGEE |
| | | LW |
| 207 | ZN727_HUMAN | RVLTFRDVAVEFSPEEWECLDSAQQRLYRDVMLENYGN |
| | | LFSLGLAIFKPDLITYLEQRKEPWNARRQKTVAKHPAGS |
| | | LHF |
| 208 | ZN550_HUMAN | AETKDAAQMLVTFKDVAVTFTREEWRQLDLAQRTLYR |
| | | EVMLETCGLLVSLGHRVPKPELVHLLEHGQELWIVKRG |
| | | LSHAT |
| 209 | ZN793_HUMAN | IEYQIPVSFKDVVVGFTQEEWHRLSPAQRALYRDVMLET |
| | | YSNLVSVGYEGTKPDVILRLEQEEAPWIGEAACPGCHC |
| | | WED |
| 210 | ZN235_HUMAN | TKFQEAVTFKDVAVAFTEEELGLLDSAQRKLYRDVMLE |
| | | NFRNLVSVGHQSFKPDMISQLEREEKLWMKELQTQRGK |
| | | HSGD |
| 211 | ZNF8_HUMAN | DEGVAGVMSVGPPAARLQEPVTFRDVAVDFTQEEWGQ |
| | | LDPTQRILYRDVMLETFGHLLSIGPELPKPEVISQLEQGTE |
| | | LW |
| 212 | ZN724_HUMAN | GPLTFMDVAIEFSVEEWQCLDTAQQNLYRNVMLENYRN |
| | | LVFLGIAVSKPDLITCLEQGKEPWNMERHEMVAKPPGM |
| | | CCYF |
| 213 | ZN573_HUMAN | HQVGLIRSYNSKTMTCFQELVTFRDVAIDFSRQEWEYLD |
| | | PNQRDLYRDVMLENYRNLVSLGGHSISKPVVVDLLERG |
| | | KEP |
| 214 | ZN577_HUMAN | NATIVMSVRREQGSSSGEGSLSFEDVAVGFTREEWQFLD |
| | | QSQKVLYKEVMLENYINLVSIGYRGTKPDSLFKLEQGEP |
| | | PG |
| 215 | ZN789_HUMAN | FPPARGKELLSFEDVAMYFTREEWGHLNWGQKDLYRD |
| | | VMLENYRNMVLLGFQFPKPEMICQLENWDEQWILDLPR |
| | | TGNRK |
| 216 | ZN718_HUMAN | ELLTFKDVAIEFSPEEWKCLDTSQQNLYRDVMLENYRNL |
| | | VSLGVSISNPDLVTSLEQRKEPYNLKIHETAARPPAVCSH |
| | | F |
| 217 | ZN300_HUMAN | MKSQGLVSFKDVAVDFTQEEWQQLDPSQRTLYRDVML |
| | | ENYSHLVSMGYPVSKPDVISKLEQGEEPWIIKGDISNWIY |
| | | PDE |
| 218 | ZN383_HUMAN | AEGSVMFSDVSIDFSQEEWDCLDPVQRDLYRDVMLENY |
| | | GNLVSMGLYTPKPQVISLLEQGKEPWMVGRELTRGLCS |
| | | DLES |
| 219 | ZN429_HUMAN | GPLTFTDVAIEFSLEEWQCLDTAQQNLYRNVMLENYRN |
| | | LVFLGIAVSKPDLITCLEKEKEPCKMKRHEMVDEPPVVC |
| | | SHF |
| 220 | ZN677_HUMAN | ALSQGLFTFKDVAIEFSQEEWECLDPAQRALYRDVMLE |
| | | NYRNLLSLDEDNIPPEDDISVGFTSKGLSPKENNKEELYH |
| | | LV |
| 221 | ZN850_HUMAN | NMEGLVMFQDLSIDFSQEEWECLDAAQKDLYRDVMME |
| | | NYSSLVSLGLSIPKPDVISLLEQGKEPWMVSRDVLGGWC |
| | | RDSE |
| 222 | ZN454_HUMAN | AVSHLPTMVQESVTFKDVAILFTQEEWGQLSPAQRALY |
| | | RDVMLENYSNLVSLGLLGPKPDTFSQLEKREVWMPEDT |
| | | PGGF |
| 223 | ZN257_HUMAN | GPLTIRDVTVEFSLEEWHCLDTAQQNLYRDVMLENYRN |
| | | LVFLGIAVSKPDLITCLEQGKEPCNMKRHEMVAKPPVM |
| | | CSHI |
| 224 | ZN264_HUMAN | AAAVLTDRAQVSVTFDDVAVTFTKEEWGQLDLAQRTL |
| | | YQEVMLENCGLLVSLGCPVPKAELICHLEHGQEPWTRK |
| | | EDLSQ |
| 225 | ZFP82_HUMAN | ALRSVMFSDVSIDESPEEWEYLDLEQKDLYRDVMLENY |
| | | SNLVSLGCFISKPDVISSLEQGKEPWKVVRKGRRQYPDL |
| | | ETK |
| 226 | ZFP14_HUMAN | AHGSVTFRDVAIDFSQEEWEFLDPAQRDLYRDVMWENY |
| | | SNFISLGPSISKPDVITLLDEERKEPGMVVREGTRRYCPD |
| | | LE |
| 227 | ZN485_HUMAN | APRAQIQGPLTFGDVAVAFTRIEWRHLDAAQRALYRDV |
| | | MLENYGNLVSVGLLSSKPKLITQLEQGAEPWTEVREAPS |
| | | GTH |
| 228 | ZN737_HUMAN | GPLQFRDVAIEFSLEEWHCLDTAQRNLYRNVMLENYRN |
| | | LVFLGIVVSKPDLITCLEQGKKPLTMKKHEMVANPSVTC |
| | | SHF |
| 229 | ZNF44_HUMAN | TLPRGQPEVLEWGLPKDQDSVAFEDVAVNFTHEEWALL |
| | | GPSQKNLYRDVMRETIRNLNCIGMKWENQNIDDQHQNL |
| | | RRNP |
| 230 | ZN596_HUMAN | PSPDSMTFEDIIVDFTQEEWALLDTSQRKLFQDVMLENIS |
| | | HLVSIGKQLCKSVVLSQLEQVEKLSTQRISLLQGREVGIK |
| 231 | ZN565_HUMAN | EESREIRAGQIVLKAMAQGLVTFRDVAIEFSLEEWKCLEP |
| | | AQRDLYREVTLENFGHLASLGLSISKPDVVSLLEQGKEP |
| | | W |
| 232 | ZN543_HUMAN | AASAQVSVTFEDVAVTFTQEEWGQLDAAQRTLYQEVM |
| | | LETCGLLMSLGCPLFKPELIYQLDHRQELWMATKDLSQS |
| | | SYPG |
| 233 | ZFP69_HUMAN | RESLEDEVTPGLPTAESQELLTFKDISIDFTQEEWGQLAP |
| | | AHQNLYREVMLENYSNLVSVGYQLSKPSVISQLEKGEEP |
| | | W |
| 234 | SUMO1_ | EGEYIKLKVIGQDSSEIHFKVKMTTHLKKLKESYCQRQG |
| | HUMAN | VPMNSLRFLFEGQRIADNHTPKELGMEEEDVIEVYQEQT |
| | | GG |
| 235 | ZNF12_HUMAN | NKSLGPVSFKDVAVDFTQEEWQQLDPEQKITYRDVMLE |
| | | NYSNLVSVGYHIIKPDVISKLEQGEEPWIVEGEFLLQSYP |
| | | DE |
| 236 | ZN169_HUMAN | SPGLLTTRKEALMAFRDVAVAFTQKEWKLLSSAQRTLY |
| | | REVMLENYSHLVSLGIAFSKPKLIEQLEQGDEPWREENE |
| | | HLL |
| 237 | ZN433_HUMAN | MFQDSVAFEDVAVTFTQEEWALLDPSQKNLCRDVMQE |
| | | TFRNLASIGKKWKPQNIYVEYENLRRNLRIVGERLFESKE |
| | | GHQ |
| 238 | SUMO3_ | ENDHINLKVAGQDGSVVQFKIKRHTPLSKLMKAYCERQ |
| | HUMAN | GLSMRQIRFRFDGQPINETDTPAQLEMEDEDTIDVFQQQ |
| | | TGG |
| 239 | ZNF98_HUMAN | PGPLGSLEMGVLTFRDVALEFSLEEWQCLDTAQQNLYR |
| | | NVMLENYRNLVFVGIAASKPDLITCLEQGKEPWNVKRH |
| | | EMVT |
| 240 | ZN175_HUMAN | LSQKPQVLGPEKQDGSCEASVSFEDVTVDFSREEWQQL |
| | | DPAQRCLYRDVMLELYSHLFAVGYHIPNPEVIFRMLKEK |
| | | EPR |
| 241 | ZN347_HUMAN | ALTQGQVTFRDVAIEFSQEEWTCLDPAQRTLYRDVMLE |
| | | NYRNLASLGISCFDLSIISMLEQGKEPFTLESQVQIAGNPD |
| | | G |
| 242 | ZNF25_HUMAN | NKFQGPVTLKDVIVEFTKEEWKLLTPAQRTLYKDVMLE |
| | | NYSHLVSVGYHVNKPNAVFKLKQGKEPWILEVEFPHRG |
| | | FPED |
| 243 | ZN519_HUMAN | ELLTFRDVAIEFSPEEWKCLDPAQQNLYRDVMLENYRN |
| | | LVSLAVYSYYNQGILPEQGIQDSFKKATLGRYGSCGLENI |
| | | CL |
| 244 | Z585B_HUMAN | SPQKSSALAPEDHGSSYEGSVSFRDVAIDFSREEWRHLD |
| | | LSQRNLYRDVMLETYSHLLSVGYQVPKPEVVMLEQGKE |
| | | PWA |
| 245 | ZIM3_HUMAN | NNSQGRVTFEDVTVNFTQGEWQRLNPEQRNLYRDVML |
| | | ENYSNLVSVGQGETTKPDVILRLEQGKEPWLEEEEVLGS |
| | | GRAE |
| 246 | ZN517_HUMAN | AMALPMPGPQEAVVFEDVAVYFTRIEWSCLAPDQQALY |
| | | RDVMLENYGNLASLGFLVAKPALISLLEQGEEPGALILQ |
| | | VAE |
| 247 | ZN846_HUMAN | DSSQHLVTFEDVAVDFTQEEWTLLDQAQRDLYRDVMLE |
| | | NYKNLIILAGSELFKRSLMSGLEQMEELRTGVTGVLQEL |
| | | DLQ |
| 248 | ZN230_HUMAN | TTFKEAVTFKDVAVFFTEEELGLLDPAQRKLYQDVMLE |
| | | NFTNLLSVGHQPFHPFHFLREEKFWMMETATQREGNSG |
| | | GKTI |
| 249 | ZNF66_HUMAN | GPLQFRDVAIEFSLEEWHCLDMAQRNLYRDVMLENYRN |
| | | LVFLGIVVSKPDLITHLEQGKKPSTMQRHEMVANPSVLC |
| | | SHF |
| 250 | ZFP1_HUMAN | NKSQGSVSFTDVTVDFTQEEWEQLDPSQRILYMDVMLE |
| | | NYSNLLSVEVWKADDQMERDHRNPDEQARQFLILKNQT |
| | | PIEE |
| 251 | ZN713_HUMAN | EEEEMNDGSQMVRSQESLTFQDVAVDFTREEWDQLYPA |
| | | QKNLYRDVMLENYRNLVALGYQLCKPEVIAQLELEEEW |
| | | VIER |
| 252 | ZN816_HUMAN | EEATKKSKEKEPGMALPQGRLTFRDVAIEFSLEEWKCLN |
| | | PAQRALYRAVMLENYRNLEFVDSSLKSMMEFSSTRHSIT |
| | | GE |
| 253 | ZN426_HUMAN | EKTPAGRIVADCLTDCYQDSVTFDDVAVDFTQEEWTLL |
| | | DSTQRSLYSDVMLENYKNLATVGGQIIKPSLISWLEQEES |
| | | RT |
| 254 | ZN674_HUMAN | AMSQESLTFKDVFVDFTLEEWQQLDSAQKNLYRDVMLE |
| | | NYSHLVSVGHLVGKPDVIFRLGPGDESWMADGGTPVRT |
| | | CAGE |
| 255 | ZN627_HUMAN | DSVAFEDVAVNFTLEEWALLDPSQKNLYRDVMRETFRN |
| | | LASVGKQWEDQNIEDPFKIPRRNISHIPERLCESKEGGQG |
| | | EE |
| 256 | ZNF20_HUMAN | MFQDSVAFEDVAVSFTQEEWALLDPSQKNLYRDVMQE |
| | | TFKNLTSVGKTWKVQNIEDEYKNPRRNLSLMREKLCES |
| | | KESHH |
| 257 | Z587B_HUMAN | AVVATLRLSAQGTVTFEDVAVKFTQEEWNLLSEAQRCL |
| | | YRDVTLENLALMSSLGCWCGVEDEAAPSKQSIYIQRETQ |
| | | VRT |
| 258 | ZN316_HUMAN | EEEEEDEDEDDLLTAGCQELVTFEDVAVYFSLEEWERLE |
| | | ADQRGLYQEVMQENYGILVSLGYPIPKPDLIFRLEQGEEP |
| | | W |
| 259 | ZN233_HUMAN | TKFQEMVTFKDVAVVFTREELGLLDLAQRKLYQDVMLE |
| | | NFRNLLSVGYQPFKLDVILQLGKEDKLRMMETEIQGDG |
| | | CSGH |
| 260 | ZN611_HUMAN | EEAAQKRKGKEPGMALPQGRLTFRDVAIEFSLAEWKCL |
| | | NPSQRALYREVMLENYRNLEAVDISSKCMMKEVLSTGQ |
| | | GNTE |
| 261 | ZN556_HUMAN | DTVVFEDVVVDFTLEEWALLNPAQRKLYRDVMLETFKH |
| | | LASVDNEAQLKASGSISQQDTSGEKLSLKQKIEKFTRKNI |
| | | WA |
| 262 | ZN234_HUMAN | TTFKEGLTFKDVAVVFTEEELGLLDPVQRNLYQDVMLE |
| | | NFRNLLSVGHHPFKHDVFLLEKEKKLDIMKTATQRKGK |
| | | SADK |
| 263 | ZN560_HUMAN | SALQQEFWKIQTSNGIQMDLVTFDSVAVEFTQEEWTLLD |
| | | PAQRNLYSDVMLENYKNLSSVGYQLFKPSLISWLEEEEE |
| | | LS |
| 264 | ZNF77_HUMAN | DCVIFEEVAVNFTPEEWALLDHAQRSLYRDVMLETCRN |
| | | LASLDCYIYVRTSGSSSQRDVFGNGISNDEEIVKFTGSDS |
| | | WS |
| 265 | ZN682_HUMAN | ELLTFRDVTIEFSLEEWEFLNPAQQSLYRKVMLENYRNL |
| | | VSLGLTVSKPELISRLEQRQEPWNVKRHETIAKPPAMSSH |
| | | Y |
| 266 | ZN614_HUMAN | IKTQESLTLEDVAVEFSWEEWQLLDTAQKNLYRDVMVE |
| | | NYNHLVSLGYQTSKPDVLSKLAHGQEPWTTDAKIQNKN |
| | | CPGI |
| 267 | ZN785_HUMAN | PAHVPGEAGPRRTRESRPGAVSFADVAVYFSPEEWECLR |
| | | PAQRALYRDVMRETFGHLGALGFSVPKPAFISWVEGEV |
| | | EAW |
| 268 | ZN445_HUMAN | GCPGDQVTPTRSLTAQLQETMTFKDVEVTFSQDEWGWL |
| | | DSAQRNLYRDVMLENYRNMASLVGPFTKPALISWLEAR |
| | | EPWG |
| 269 | ZFP30_HUMAN | ARDLVMFRDVAVDFSQEEWECLNSYQRNLYRDVILENY |
| | | SNLVSLAGCSISKPDVITLLEQGKEPWMVVRDEKRRWTL |
| | | DLE |
| 270 | ZN225_HUMAN | TTLKEAVTFKDVAVVFTEEELRLLDLAQRKLYREVMLE |
| | | NFRNLLSVGHQSLHRDTFHFLKEEKFWMMETATQREGN |
| | | LGGK |
| 271 | ZN551_HUMAN | SPPSPRSSMAAVALRDSAQGMTFEDVAIYFSQEEWELLD |
| | | ESQRFLYCDVMLENFAHVTSLGYCHGMENEAIASEQSV |
| | | SIQ |
| 272 | ZN610_HUMAN | DEEAQKRKAKESGMALPQGRLTFMDVAIEFSQEEWKSL |
| | | DPGQRALYRDVMLENYRNLVFLGICLPDLSIISMLKQRR |
| | | EPL |
| 273 | ZN528_HUMAN | ALTQGPLKFMDVAIEFSQEEWKCLDPAQRTLYRDVMLE |
| | | NYRNLVSLGICLPDLSVTSMLEQKRDPWTLQSEEKIAND |
| | | PDG |
| 274 | ZN284_HUMAN | TMFKEAVTFKDVAVVFTEEELGLLDVSQRKLYRDVMLE |
| | | NFRNLLSVGHQLSHRDTFHFQREEKFWIMETATQREGNS |
| | | GGK |
| 275 | ZN418_HUMAN | QGTVAFEDVAVNFSQEEWSLLSEVQRCLYHDVMLENW |
| | | VLISSLGCWCGSEDEEAPSKKSISIQRVSQVSTPGAGVSP |
| | | KKA |
| 276 | MPP8_HUMAN | AEAFGDSEEDGEDVFEVEKILDMKTEGGKVLYKVRWK |
| | | GYTSDDDTWEPEIHLEDCKEVLLEFRKKIAENKAKAVRK |
| | | DIQR |
| 277 | ZN490_HUMAN | VLQMQNSEHHGQSIKTQTDSISLEDVAVNFTLEEWALLD |
| | | PGQRNIYRDVMRATFKNLACIGEKWKDQDIEDEHKNQG |
| | | RNL |
| 278 | ZN805_HUMAN | AMALTDPAQVSVTFDDVAVTFTQEEWGQLDLAQRTLY |
| | | QEVMLENCGLLVSLGCPVPRPELIYHLEHGQEPWTRKED |
| | | LSQG |
| 279 | Z780B_HUMAN | VHGSVTFRDVAIDFSQEEWECLQPDQRTLYRDVMLENY |
| | | SHLISLGSSISKPDVITLLEQEKEPWIVVSKETSRWYPDLE |
| | | S |
| 280 | ZN763_HUMAN | DPVACEDVAVNFTQEEWALLDISQRKLYREVMLETFRN |
| | | LTSIGKKWKDQNIEYEYQNPRRNFRSLIEGNVNEIKEDSH |
| | | CG |
| 281 | ZN285_HUMAN | IKFQERVTFKDVAVVFTKEELALLDKAQINLYQDVMLE |
| | | NFRNLMLVRDGIKNNILNLQAKGLSYLSQEVLHCWQIW |
| | | KQRI |
| 282 | ZNF85_HUMAN | GPLTFRDVAIEFSLKEWQCLDTAQRNLYRNVMLENYRN |
| | | LVFLGITVSKPDLITCLEQGKEAWSMKRHEIMVAKPTVM |
| | | CSH |
| 283 | ZN223_HUMAN | TMSKEAVTFKDVAVVFTEEELGLLDLAQRKLYRDVMLE |
| | | NFRNLLSVGHQPFHRDTFHFLREEKFWMMDIATQREGN |
| | | SGGK |
| 284 | ZNF90_HUMAN | GPLEFRDVAIEFSLEEWHCLDTAQQNLYRDVMLENYRH |
| | | LVFLGIVVTKPDLITCLEQGKKPFTVKRHEMIAKSPVMCF |
| | | HF |
| 285 | ZN557_HUMAN | GHTEGGELVNELLKSWLKGLVTFEDVAVEFTQEEWALL |
| | | DPAQRTLYRDVMLENCRNLASLGNQVDKPRLISQLEQE |
| | | DKVM |
| 286 | ZN425_HUMAN | AEPASVTVTFDDVALYFSEQEWEILEKWQKQMYKQEM |
| | | KTNYETLDSLGYAFSKPDLITWMEQGRMLLISEQGCLDK |
| | | TRRT |
| 287 | ZN229_HUMAN | HSQASAISQDREEKIMSQEPLSFKDVAVVFTEEELELLDS |
| | | TQRQLYQDVMQENFRNLLSVGERNPLGDKNGKDTEYIQ |
| | | DE |
| 288 | ZN606_HUMAN | GSLEEGRRATGLPAAQVQEPVTFKDVAVDFTQEEWGQL |
| | | DLVQRTLYRDVMLETYGHLLSVGNQIAKPEVISLLEQGE |
| | | EPW |
| 289 | ZN155_HUMAN | TTFKEAVTFKDVAVVFTEEELGLLDPAQRKLYRDVMLE |
| | | NFRNLLSVGHQPFHQDTCHFLREEKFWMMGTATQREG |
| | | NSGGK |
| 290 | ZN222_HUMAN | AKLYEAVTFKDVAVIFTEEELGLLDPAQRKLYRDVMLE |
| | | NFRNLLSVGGKIQTEMETVPEAGTHEEFSCKQIWEQIAS |
| | | DLT |
| 291 | ZN442_HUMAN | RSDLFLPDSQTNEERKQYDSVAFEDVAVNFTQEEWALL |
| | | GPSQKSLYRDVMWETIRNLDCIGMKWEDTNIEDQHRNP |
| | | RRSL |
| 292 | ZNF91_HUMAN | PGTPGSLEMGLLTFRDVAIEFSPEEWQCLDTAQQNLYRN |
| | | VMLENYRNLAFLGIALSKPDLITYLEQGKEPWNMKQHE |
| | | MVD |
| 293 | ZN135_HUMAN | TPGVRVSTDPEQVTFEDVVVGFSQEEWGQLKPAQRTLY |
| | | RDVMLDTFRLLVSVGHWLPKPNVISLLEQEAELWAVES |
| | | RLPQ |
| 294 | ZN778_HUMAN | EQTQAAGMVAGWLINCYQDAVTFDDVAVDFTQEEWTL |
| | | LDPSQRDLYRDVMLENYENLASVEWRLKTKGPALRQD |
| | | RSWFRA |
| 295 | RYBP_HUMAN | PSEANSIQSANATTKTSETNHTSRPRLKNVDRSTAQQLA |
| | | VTVGNVTVIITDFKEKTRSSSTSSSTVTSSAGSEQQNQSSS |
| 296 | ZN534_HUMAN | ALTQGQLSFSDVAIEFSQEEWKCLDPGQKALYRDVMLE |
| | | NYRNLVSLGEDNVRPEACICSGICLPDLSVTSMLEQKRD |
| | | PWT |
| 297 | ZN586_HUMAN | AAAAALRAPAQSSVTFEDVAVNFSLEEWSLLNEAQRCL |
| | | YRDVMLETLTLISSLGCWHGGEDEAAPSKQSTCIHIYKD |
| | | QGG |
| 298 | ZN567_HUMAN | AQGSVSFNDVTVDFTQEEWQHLDHAQKTLYMDVMLEN |
| | | YCHLISVGCHMTKPDVILKLERGEEPWTSFAGHTCLEEN |
| | | WKAE |
| 299 | ZN440_HUMAN | DPVAFKDVAVNFTQEEWALLDISQRKLYREVMLETFRN |
| | | LTSLGKRWKDQNIEYEHQNPRRNFRSLIEEKVNEIKDDS |
| | | HCG |
| 300 | ZN583_HUMAN | SKDLVTFGDVAVNFSQEEWEWLNPAQRNLYRKVMLEN |
| | | YRSLVSLGVSVSKPDVISLLEQGKEPWMVKKEGTRGPCP |
| | | DWEY |
| 301 | ZN441_HUMAN | DSVAFEDVAINFTCEEWALLGPSQKSLYRDVMQETIRNL |
| | | DCIGMIWQNHDIEEDQYKDLRRNLRCHMVERACEIKDN |
| | | SQC |
| 302 | ZNF43_HUMAN | GPLTFMDVAIEFCLEEWQCLDIAQQNLYRNVMLENYRN |
| | | LVFLGIAVSKPDLITCLEQEKEPWEPMRRHEMVAKPPVM |
| | | CSH |
| 303 | CBX5_HUMAN | QSNDIARGFERGLEPEKIIGATDSCGDLMFLMKWKDTDE |
| | | ADLVLAKEANVKCPQIVIAFYEERLTWHAYPEDAENKE |
| | | KET |
| 304 | ZN589_HUMAN | ALPAKDSAWPWEEKPRYLGPVTFEDVAVLFTEAEWKRL |
| | | SLEQRNLYKEVMLENLRNLVSLAESKPEVHTCPSCPLAF |
| | | GSQ |
| 305 | ZNF10_HUMAN | DAKSLTAWSRTLVTFKDVFVDFTREEWKLLDTAQQIVY |
| | | RNVMLENYKNLVSLGYQLTKPDVILRLEKGEEPWLVER |
| | | EIHQ |
| 306 | ZN563_HUMAN | DAVAFEDVAVNFTQEEWALLGPSQKNLYRYVMQETIRN |
| | | LDCIRMIWEEQNTEDQYKNPRRNLRCHMVERFSESKDSS |
| | | QCG |
| 307 | ZN561_HUMAN | EKTKVERMVEDYLASGYQDSVTFDDVAVDFTPEEWALL |
| | | DTTEKYLYRDVMLENYMNLASVEWEIQPRTKRSSLQQG |
| | | FLKN |
| 308 | ZN136_HUMAN | DSVAFEDVDVNFTQEEWALLDPSQKNLYRDVMWETMR |
| | | NLASIGKKWKDQNIKDHYKHRGRNLRSHMLERLYQTK |
| | | DGSQRG |
| 309 | ZN630_HUMAN | IESQEPVTFEDVAVDFTQEEWQQLNPAQKTLHRDVMLE |
| | | TYNHLVSVGCSGIKPDVIFKLEHGKDPWIIESELSRWIYP |
| | | DR |
| 310 | ZN527_HUMAN | AVGLCKAMSQGLVTFRDVALDFSQEEWEWLKPSQKDL |
| | | YRDVMLENYRNLVWLGLSISKPNMISLLEQGKEPWMVE |
| | | RKMSQ |
| 311 | ZN333_HUMAN | DKVEEEAMAPGLPTACSQEPVTFADVAVVFTPEEWVFL |
| | | DSTQRSLYRDVMLENYRNLASVADQLCKPNALSYLEER |
| | | GEQW |
| 312 | Z324B_HUMAN | TFEDVAVYFSQEEWGLLDTAQRALYRHVMLENFTLVTS |
| | | LGLSTSRPRVVIQLERGEEPWVPSGKDMTLARNTYGRLN |
| | | SGS |
| 313 | ZN786_HUMAN | AEPPRLPLTFEDVAIYFSEQEWQDLEAWQKELYKHVMR |
| | | SNYETLVSLDDGLPKPELISWIEHGGEPFRKWRESQKSG |
| | | NII |
| 314 | ZN709_HUMAN | DSVVFEDVAVNFTQEEWALLGPSQKKLYRDVMQETFV |
| | | NLASIGENWEEKNIEDHKNQGRKLRSHMVERLCERKEG |
| | | SQFGE |
| 315 | ZN792_HUMAN | AAAALRDPAQGCVTFEDVTIYFSQEEWVLLDEAQRLLY |
| | | CDVMLENFALIASLGLISFRSHIVSQLEMGKEPWVPDSV |
| | | DMT |
| 316 | ZN599_HUMAN | AAPALALVSFEDVVVTFTGEEWGHLDLAQRTLYQEVML |
| | | ETCRLLVSLGHPVPKPELIYLLEHGQELWTVKRGLSQST |
| | | CAG |
| 317 | ZN613_HUMAN | IKSQESLTLEDVAVEFTWEEWQLLGPAQKDLYRDVMLE |
| | | NYSNLVSVGYQASKPDALFKLEQGEPWTVENEIHSQICP |
| | | EIK |
| 318 | ZF69B_HUMAN | GESLESRVTLGSLTAESQELLTFKDVSVDFTQEEWGQLA |
| | | PAHRNLYREVMLENYGNLVSVGCQLSKPGVISQLEKGE |
| | | EPW |
| 319 | ZN799_HUMAN | ASVALEDVAVNFTREEWALLGPCQKNLYKDVMQETIRN |
| | | LDCVGMKWKDQNIEDQYRYPRKNLRCRMLERFVESKD |
| | | GTQCG |
| 320 | ZN569_HUMAN | TESQGTVTFKDVAIDFTQEEWKRLDPAQRKLYRNVMLE |
| | | NYNNLITVGYPFTKPDVIFKLEQEEEPWVMEEEVLRRHW |
| | | QGE |
| 321 | ZN564_HUMAN | DSVASEDVAVNFTLEEWALLDPSQKKLYRDVMRETFRN |
| | | LACVGKKWEDQSIEDWYKNQGRILRNHMEEGLSESKEY |
| | | DQCG |
| 322 | ZN546_HUMAN | EETQGELTSSCGSKTMANVSLAFRDVSIDLSQEEWECLD |
| | | AVQRDLYKDVMLENYSNLVALGYTIPKPDVITLLEQEKE |
| | | PW |
| 323 | ZFP92_HUMAN | AAILLTTRPKVPVSFEDVSVYFTKTEWKLLDLRQKVLYK |
| | | RVMLENYSHLVSLGFSFSKPHLISQLERGEGPWVADIPRT |
| | | W |
| 324 | YAF2_HUMAN | KDKVEKEKSEKETTSKKNSHKKTRPRLKNVDRSSAQHL |
| | | EVTVGDLTVIITDFKEKTKSPPASSAASADQHSQSGSSSD |
| | | NT |
| 325 | ZN723_HUMAN | GPLTFTDVAIKFSLEEWQFLDTAQQNLYRDVMLENYRN |
| | | LVFLGVGVSKPDLITCLEQGKEPWNMKRHKMVAKPPVV |
| | | CSHF |
| 326 | ZNF34_HUMAN | RKPNPQAMAALFLSAPPQAEVTFEDVAVYLSREEWGRL |
| | | GPAQRGLYRDVMLETYGNLVSLGVGPAGPKPGVISQLE |
| | | RGDE |
| 327 | ZN439_HUMAN | LSLSPILLYTCEMFQDPVAFKDVAVNFTQEEWALLDISQ |
| | | KNLYREVMLETFWNLTSIGKKWKDQNIEYEYQNPRRNF |
| | | RSV |
| 328 | ZFP57_HUMAN | AAGEPRSLLFFQKPVTFEDVAVNFTQEEWDCLDASQRV |
| | | LYQDVMSETFKNLTSVARIFLHKPELITKLEQEEEQWRE |
| | | TRV |
| 329 | ZNF19_HUMAN | AAMPLKAQYQEMVTFEDVAVHFTKTEWTGLSPAQRAL |
| | | YRSVMLENFGNLTALGYPVPKPALISLLERGDMAWGLE |
| | | AQDDP |
| 330 | ZN404_HUMAN | ARVPLTFSDVAIDFSQEEWEYLNSDQRDLYRDVMLENY |
| | | TNLVSLDFNFTTESNKLSSEKRNYEVNAYHQETWKRNK |
| | | TFNL |
| 331 | ZN274_HUMAN | ASRLPTAWSCEPVTFEDVTLGFTPEEWGLLDLKQKSLYR |
| | | EVMLENYRNLVSVEHQLSKPDVVSQLEEAEDFWPVERG |
| | | IPQ |
| 332 | CBX3_HUMAN | SKKKRDAADKPRGFARGLDPERIIGATDSSGELMFLMK |
| | | WKDSDEADLVLAKEANMKCPQIVIAFYEERLTWHSCPE |
| | | DEAQ |
| 333 | ZNF30_HUMAN | AHKYVGLQYHGSVTFEDVAIAFSQQEWESLDSSQRGLY |
| | | RDVMLENYRNLVSMGHSRSKPHVIALLEQWKEPEVTVR |
| | | KDGR |
| 334 | ZN250_HUMAN | AAARLLPVPAGPQPLSFQAKLTFEDVAVLLSQDEWDRL |
| | | CPAQRGLYRNVMMETYGNVVSLGLPGSKPDIISQLERGE |
| | | DPW |
| 335 | ZN570_HUMAN | AVGLLKAMYQELVTFRDVAVDFSQEEWDCLDSSQRHL |
| | | YSNVMLENYRILVSLGLCFSKPSVILLLEQGKAPWMVKR |
| | | ELTK |
| 336 | ZN675_HUMAN | GLLTFRDVAIEFSLEEWQCLDTAQRNLYKNVILENYRNL |
| | | VFLGIAVSKQDLITCLEQEKEPLTVKRHEMVNEPPVMCS |
| | | HF |
| 337 | ZN695_HUMAN | GLLAFRDVALEFSPEEWECLDPAQRSLYRDVMLENYRN |
| | | LISLGEDSFNMQFLFHSLAMSKPELIICLEARKEPWNVNT |
| | | EK |
| 338 | ZN548_HUMAN | NLTEGRVVFEDVAIYFSQEEWGHLDEAQRLLYRDVMLE |
| | | NLALLSSLGSWHGAEDEEAPSQQGFSVGVSEVTASKPCL |
| | | SSQ |
| 339 | ZN132_HUMAN | GPAQHTSWPCGSAVPTLKSMVTFEDVAVYFSQEEWELL |
| | | DAAQRHLYHSVMLENLELVTSLGSWHGVEGEGAHPKQ |
| | | NVSVE |
| 340 | ZN738_HUMAN | SGYPGAERNLLEYSYFEKGPLTFRDVVIEFSQEEWQCLD |
| | | TAQQDLYRKVMLENFRNLVFLGIDVSKPDLITCLEQGKD |
| | | PW |
| 341 | ZN420_HUMAN | ARKLVMFRDVAIDFSQEEWECLDSAQRDLYRDVMLEN |
| | | YSNLVSLDLPSRCASKDLSPEKNTYETELSQWEMSDRLE |
| | | NCDL |
| 342 | ZN626_HUMAN | GPLQFRDVAIEFSLEEWHCLDTAQRNLYRNVMLENYSN |
| | | LVFLGITVSKPDLITCLEQGRKPLTMKRNEMIAKPSVMCS |
| | | HF |
| 343 | ZN559_HUMAN | VAGWLTNYSQDSVTFEDVAVDFTQEEWTLLDQTQRNL |
| | | YRDVMLENYKNLVAVDWESHINTKWSAPQQNFLQGKT |
| | | SSVVEM |
| 344 | ZN460_HUMAN | AAAWMAPAQESVTFEDVAVTFTQEEWGQLDVTQRALY |
| | | VEVMLETCGLLVALGDSTKPETVEPIPSHLALPEEVSLQE |
| | | QLA |
| 345 | ZN268_HUMAN | VLEWLFISQEQPKITKSWGPLSFMDVFVDFTWEEWQLLD |
| | | PAQKCLYRSVMLENYSNLVSLGYQHTKPDIIFKLEQGEE |
| | | LC |
| 346 | ZN304_HUMAN | AAAVLMDRVQSCVTFEDVFVYFSREEWELLEEAQRFLY |
| | | RDVMLENFALVATLGFWCEAEHEAPSEQSVSVEGVSQV |
| | | RTAE |
| 347 | ZIM2_HUMAN | AGSQFPDFKHLGTFLVFEELVTFEDVLVDFSPEELSSLSA |
| | | AQRNLYREVMLENYRNLVSLGHQFSKPDIISRLEEEESY |
| | | A |
| 348 | ZN605_HUMAN | IQSQISFEDVAVDFTLEEWQLLNPTQKNLYRDVMLENYS |
| | | NLVFLEVWLDNPKMWLRDNQDNLKSMERGHKYDVFG |
| | | KIFNS |
| 349 | ZN844_HUMAN | DLVAFEDVAVNFTQEEWSLLDPSQKNLYREVMQETLRN |
| | | LASIGEKWKDQNIEDQYKNPRNNLRSLLGERVDENTEEN |
| | | HCG |
| 350 | SUMO5_ | KDEDIKLRVIGQDSSEIHFKVKMTTPLKKLKKSYCQRQG |
| | HUMAN | VPVNSLRFLFEGQRIADNHTPEELGMEEEDVIEVYQEQIG |
| | | G |
| 351 | ZN101_HUMAN | DSVAFEDVAVNFTQEEWALLSPSQKNLYRDVTLETFRN |
| | | LASVGIQWKDQDIENLYQNLGIKLRSLVERLCGRKEGNE |
| | | HRE |
| 352 | ZN783_HUMAN | RNFWILRLPPGSKGEAPKVPVTFDDVAVYFSELEWGKLE |
| | | DWQKELYKHVMRGNYETLVSLDYAISKPDILTRIERGEE |
| | | PC |
| 353 | ZN417_HUMAN | AAAAPRRPTQQGTVTFEDVAVNFSQEEWCLLSEAQRCL |
| | | YRDVMLENLALISSLGCWCGSKDEEAPCKQRISVQRESQ |
| | | SRT |
| 354 | ZN182_HUMAN | SGEDSGSFYSWQKAKREQGLVTFEDVAVDFTQEEWQYL |
| | | NPPQRTLYRDVMLETYSNLVFVGQQVTKPNLILKLEVEE |
| | | CPA |
| 355 | ZN823_HUMAN | DSVAFEDVAVNFTQEEWALLGPSQKSLYRNVMQETIRN |
| | | LDCIEMKWEDQNIGDQCQNAKRNLRSHTCEIKDDSQCG |
| | | ETFG |
| 356 | ZN177_HUMAN | AAGWLTTWSQNSVTFQEVAVDFSQEEWALLDPAQKNL |
| | | YKDVMLENFRNLASVGYQLCRHSLISKVDQEQLKTDER |
| | | GILQG |
| 357 | ZN197_HUMAN | ENPRNQLMALMLLTAQPQELVMFEEVSVCFTSEEWACL |
| | | GPIQRALYWDVMLENYGNVTSLEWETMTENEEVTSKPS |
| | | SSQR |
| 358 | ZN717_HUMAN | LETYNSLVSLQELVSFEEVAVHFTWEEWQDLDDAQRTL |
| | | YRDVMLETYSSLVSLGHCITKPEMIFKLEQGAEPWIVEET |
| | | PN |
| 359 | ZN669_HUMAN | RHFRRPEPCREPLASPIQDSVAFEDVAVNFTQEEWALLD |
| | | SSQKNLYREVMQETCRNLASVGSQWKDQNIEDHFEKPG |
| | | KDI |
| 360 | ZN256_HUMAN | AAAELTAPAQGIVTFEDVAVYFSWKEWGLLDEAQKCLY |
| | | HDVMLENLTLTTSLGGSGAGDEEAPYQQSTSPQRVSQV |
| | | RIPK |
| 361 | ZN251_HUMAN | AATFQLPGHQEMPLTFQDVAVYFSQAEGRQLGPQQRAL |
| | | YRDVMLENYGNVASLGFPVPKPELISQLEQGKELWVLN |
| | | LLGA |
| 362 | CBX4_HUMAN | RSEAGEPPSSLQVKPETPASAAVAVAAAAAPTTTAEKPP |
| | | AEAQDEPAESLSEFKPFFGNIIITDVTANCLTVTFKEYVTV |
| 363 | PCGF2_HUMAN | HRTTRIKITELNPHLMCALCGGYFIDATTIVECLHSFCKT |
| | | CIVRYLETNKYCPMCDVQVHKTRPLLSIRSDKTLQDIVY |
| | | K |
| 364 | CDY2_HUMAN | ASQEFEVEAIVDKRQDKNGNTQYLVRWKGYDKQDDTW |
| | | EPEQHLMNCEKCVHDFNRRQTEKQKKLTWTTTSRIFSN |
| | | NARRR |
| 365 | CDYL2_ | ASGDLYEVERIVDKRKNKKGKWEYLIRWKGYGSTEDT |
| | HUMAN | WEPEHHLLHCEEFIDEFNGLHMSKDKRIKSGKQSSTSKL |
| | | LRDS |
| 366 | HERC2_ | TLIRKADLENHNKDGGFWTVIDGKVYDIKDFQTQSLTG |
| | HUMAN | NSILAQFAGEDPVVALEAALQFEDTRESMHAFCVGQYLE |
| | | PDQ |
| 367 | ZN562_HUMAN | EKTKIGTMVEDHRSNSYQDSVTFDDVAVEFTPEEWALL |
| | | DTTQKYLYRDVMLENYMNLASVDFFFCLTSEWEIQPRT |
| | | KRSS |
| 368 | ZN461_HUMAN | AHELVMFRDVAIDVSQEEWECLNPAQRNLYKEVMLEN |
| | | YSNLVSLGLSVSKPAVISSLEQGKEPWMVVREETGRWCP |
| | | GTWK |
| 369 | Z324A_HUMAN | AFEDVAVYFSQEEWGLLDTAQRALYRRVMLDNFALVA |
| | | SLGLSTSRPRVVIQLERGEEPWVPSGTDTTLSRTTYRRRN |
| | | PGS |
| 370 | ZN766_HUMAN | AQLRRGHLTFRDVAIEFSQEEWKCLDPVQKALYRDVML |
| | | ENYRNLVSLGICLPDLSIISMMKQRTEPWTVENEMKVAK |
| | | NPD |
| 371 | ID2_HUMAN | SDHSLGISRSKTPVDDPMSLLYNMNDCYSKLKELVPSIP |
| | | QNKKVSKMEILQHVIDYILDLQIALDSHPTIVSLHHQRPG |
| | | Q |
| 372 | TOX_HUMAN | KDPNEPQKPVSAYALFFRDTQAAIKGQNPNATFGEVSKI |
| | | VASMWDGLGEEQKQVYKKKTEAAKKEYLKQLAAYRA |
| | | SLVSK |
| 373 | ZN274_HUMAN | QEEKQEDAAICPVTVLPEEPVTFQDVAVDFSREEWGLLG |
| | | PTQRTEYRDVMLETFGHLVSVGWETTLENKELAPNSDIP |
| | | EE |
| 374 | SCMH1_ | DASRLSGRDPSSWTVEDVMQFVREADPQLGPHADLFRK |
| | HUMAN | HEIDGKALLLLRSDMMMKYMGLKLGPALKLSYHIDRLK |
| | | QGKF |
| 375 | ZN214_HUMAN | AVTFEDVTIIFTWEEWKFLDSSQKRLYREVMWENYTNV |
| | | MSVENWNESYKSQEEKFRYLEYENFSYWQGWWNAGA |
| | | QMYENQ |
| 376 | CBX7_HUMAN | ELSAIGEQVFAVESIRKKRVRKGKVEYLVKWKGWPPKY |
| | | STWEPEEHILDPRLVMAYEEKEERDRASGYRKRGPKPKR |
| | | LLL |
| 377 | ID1_HUMAN | GGAGARLPALLDEQQVNVLLYDMNGCYSRLKELVPTLP |
| | | QNRKVSKVEILQHVIDYIRDLQLELNSESEVGTPGGRGLP |
| | | VR |
| 378 | CREM_HUMAN | VVMAASPGSLHSPQQLAEEATRKRELRLMKNREAAKEC |
| | | RRRKKEYVKCLESRVAVLEVQNKKLIEELETLKDICSPK |
| | | TDY |
| 379 | SCX_HUMAN | GGGPGGRPGREPRQRHTANARERDRTNSVNTAFTALRT |
| | | LIPTEPADRKLSKIETLRLASSYISHLGNVLLAGEACGDG |
| | | QP |
| 380 | ASCL1_HUMAN | SGFGYSLPQQQPAAVARRNERERNRVKLVNLGFATLRE |
| | | HVPNGAANKKMSKVETLRSAVEYIRALQQLLDEHDAVS |
| | | AAFQ |
| 381 | ZN764_HUMAN | APLPPRDPNGAGPEWREPGAVSFADVAVYFCREEWGCL |
| | | RPAQRALYRDVMRETYGHLSALGIGGNKPALISWVEEE |
| | | AELW |
| 382 | SCML2_ | KQGFSKDPSTWSVDEVIQFMKHTDPQISGPLADLFRQHEI |
| | HUMAN | DGKALFLLKSDVMMKYMGLKLGPALKLCYYIEKLKEG |
| | | KYS |
| 383 | TWST1_ | SGGGSPQSYEELQTQRVMANVRERQRTQSLNEAFAALR |
| | HUMAN | KIIPTLPSDKLSKIQTLKLAARYIDFLYQVLQSDELDSKM |
| | | AS |
| 384 | CREB1_ | IAPGVVMASSPALPTQPAEEAARKREVRLMKNREAARE |
| | HUMAN | CRRKKKEYVKCLENRVAVLENQNKTLIEELKALKDLYC |
| | | HKSD |
| 385 | TERF1_HUMAN | SRIPVSKSQPVTPEKHRARKRQAWLWEEDKNLRSGVRK |
| | | YGEGNWSKILLHYKFNNRTSVMLKDRWRTMKKLKLISS |
| | | DSED |
| 386 | ID3_HUMAN | SLAIARGRGKGPAAEEPLSLLDDMNHCYSRLRELVPGVP |
| | | RGTQLSQVEILQRVIDYILDLQVVLAEPAPGPPDGPHLPI |
| | | Q |
| 387 | CBX8_HUMAN | GSGPPSSGGGLYRDMGAQGGRPSLIARIPVARILGDPEEE |
| | | SWSPSLTNLEKVVVTDVTSNFLTVTIKESNTDQGFFKEK |
| | | R |
| 388 | CBX4_HUMAN | ELPAVGEHVFAVESIEKKRIRKGRVEYLVKWRGWSPKY |
| | | NTWEPEENILDPRLLIAFQNRERQEQLMGYRKRGPKPKP |
| | | LVV |
| 389 | GSX1_HUMAN | VDSSSNQLPSSKRMRTAFTSTQLLELEREFASNMYLSRL |
| | | RRIEIATYLNLSEKQVKIWFQNRRVKHKKEGKGSNHRG |
| | | GGG |
| 390 | NKX22_ | TPGGGGDAGKKRKRRVLFSKAQTYELERRFRQQRYLSA |
| | HUMAN | PEREHLASLIRLTPTQVKIWFQNHRYKMKRARAEKGME |
| | | VTPL |
| 391 | ATF1_HUMAN | QTVVMTSPVTLTSQTTKTDDPQLKREIRLMKNREAAREC |
| | | RRKKKEYVKCLENRVAVLENQNKTLIEELKTLKDLYSN |
| | | KSV |
| 392 | TWST2_ | KGSPSAQSFEELQSQRILANVRERQRTQSLNEAFAALRKI |
| | HUMAN | IPTLPSDKLSKIQTLKLAARYIDFLYQVLQSDEMDNKMTS |
| 393 | ZNF17_HUMAN | NLTEDYMVFEDVAIHFSQEEWGILNDVQRHLHSDVMLE |
| | | NFALLSSVGCWHGAKDEEAPSKQCVSVGVSQVTTLKPA |
| | | LSTQ |
| 394 | TOX3_HUMAN | KDPNEPQKPVSAYALFFRDTQAAIKGQNPNATFGEVSKI |
| | | VASMWDSLGEEQKQVYKRKTEAAKKEYLKALAAYRAS |
| | | LVSK |
| 395 | TOX4_HUMAN | KDPNEPQKPVSAYALFFRDTQAAIKGQNPNATFGEVSKI |
| | | VASMWDSLGEEQKQVYKRKTEAAKKEYLKALAAYKD |
| | | NQECQ |
| 396 | ZMYM3_ | LDGSTWDFCSEDCKSKYLLWYCKAARCHACKRQGKLL |
| | HUMAN | ETIHWRGQIRHFCNQQCLLRFYSQQNQPNLDTQSGPESL |
| | | LNSQ |
| 397 | I2BP1_HUMAN | ASVQASRRQWCYLCDLPKMPWAMVWDFSEAVCRGCV |
| | | NFEGADRIELLIDAARQLKRSHVLPEGRSPGPPALKHPAT |
| | | KDLA |
| 398 | RHXF1_ | MEGPQPENMQPRTRRTKFTLLQVEELESVFRHTQYPDVP |
| | HUMAN | TRRELAENLGVTEDKVRVWFKNKRARCRRHQRELMLA |
| | | NELR |
| 399 | SSX2_HUMAN | PKIMPKKPAEEGNDSEEVPEASGPQNDGKELCPPGKPTT |
| | | SEKIHERSGPKRGEHAWTHRLRERKQLVIYEEISDPEEDD |
| | | E |
| 400 | I2BPL_HUMAN | SAAQVSSSRRQSCYLCDLPRMPWAMIWDFSEPVCRGCV |
| | | NYEGADRIEFVIETARQLKRAHGCFQDGRSPGPPPPVGV |
| | | KTV |
| 401 | ZN680_HUMAN | PGPPGSLEMGPLTFRDVAIEFSLEEWQCLDTAQRNLYRK |
| | | VMFENYRNLVFLGIAVSKPHLITCLEQGKEPWNRKRQE |
| | | MVA |
| 402 | CBX1_HUMAN | NKKKVEEVLEEEEEEYVVEKVLDRRVVKGKVEYLLKW |
| | | KGFSDEDNTWEPEENLDCPDLIAEFLQSQKTAHETDKSE |
| | | GGKR |
| 403 | TRI68_HUMAN | LANVVEKVRLLRLHPGMGLKGDLCERHGEKLKMFCKE |
| | | DVLIMCEACSQSPEHEAHSVVPMEDVAWEYKWELHEA |
| | | LEHLKK |
| 404 | HXA13_ | VVSHPSDASSYRRGRKKRVPYTKVQLKELEREYATNKFI |
| | HUMAN | TKDKRRRISATTNLSERQVTIWFQNRRVKEKKVINKLKT |
| | | TS |
| 405 | PHC3_HUMAN | ENSDLLPVAQTEPSIWTVDDVWAFIHSLPGCQDIADEFR |
| | | AQEIDGQALLLLKEDHLMSAMNIKLGPALKICARINSLK |
| | | ES |
| 406 | TCF24_HUMAN | AGPGGGSRSGSGRPAAANAARERSRVQTLRHAFLELQR |
| | | TLPSVPPDTKLSKLDVLLLATTYIAHLTRSLQDDAEAPAD |
| | | AG |
| 407 | CBX3_HUMAN | QNGKSKKVEEAEPEEFVVEKVLDRRVVNGKVEYFLKW |
| | | KGFTDADNTWEPEENLDCPELIEAFLNSQKAGKEKDGT |
| | | KRKSL |
| 408 | HXB13_ | QHPPDACAFRRGRKKRIPYSKGQLRELEREYAANKFITK |
| | HUMAN | DKRRKISAATSLSERQITIWFQNRRVKEKKVLAKVKNSA |
| | | TP |
| 409 | HEY1_HUMAN | SMSPTTSSQILARKRRRGIIEKRRRDRINNSLSELRRLVPS |
| | | AFEKQGSAKLEKAEILQMTVDHLKMLHTAGGKGYFDA |
| | | HA |
| 410 | PHC2_HUMAN | LVGMGHHFLPSEPTKWNVEDVYEFIRSLPGCQEIAEEFR |
| | | AQEIDGQALLLLKEDHLMSAMNIKLGPALKIYARISMLK |
| | | DS |
| 411 | ZNF81_HUMAN | PANEDAPQPGEHGSACEVSVSFEDVTVDFSREEWQQLD |
| | | STQRRLYQDVMLENYSHLLSVGFEVPKPEVIFKLEQGEG |
| | | PWT |
| 412 | FIGLA_HUMAN | GYSSTENLQLVLERRRVANAKERERIKNLNRGFARLKAL |
| | | VPFLPQSRKPSKVDILKGATEYIQVLSDLLEGAKDSKKQ |
| | | DP |
| 413 | SAM11_ | EEAPAPEDVTKWTVDDVCSFVGGLSGCGEYTRVFREQG |
| | HUMAN | IDGETLPLLTEEHLLTNMGLKLGPALKIRAQVARRLGRV |
| | | FYV |
| 414 | KMT2B_ | GGTLAHTPRRSLPSHHGKKMRMARCGHCRGCLRVQDC |
| | HUMAN | GSCVNCLDKPKFGGPNTKKQCCVYRKCDKIEARKMERL |
| | | AKKGR |
| 415 | HEY2_HUMAN | LNSPTTTSQIMARKKRRGIIEKRRRDRINNSLSELRRLVPT |
| | | AFEKQGSAKLEKAEILQMTVDHLKMLQATGGKGYFDA |
| | | HA |
| 416 | JDP2_HUMAN | QPVKSELDEEEERRKRRREKNKVAAARCRNKKKERTEF |
| | | LQRESERLELMNAELKTQIEELKQERQQLILMLNRHRPT |
| | | CIV |
| 417 | HXC13_ | LQPEVSSYRRGRKKRVPYTKVQLKELEKEYAASKFITKE |
| | HUMAN | KRRRISATTNLSERQVTIWFQNRRVKEKKVVSKSKAPHL |
| | | HS |
| 418 | ASCL4_HUMAN | LPVPLDSAFEPAFLRKRNERERQRVRCVNEGYARLRDHL |
| | | PRELADKRLSKVETLRAAIDYIKHLQELLERQAWGLEGA |
| | | AG |
| 419 | HHEX_HUMAN | SPFLQRPLHKRKGGQVRFSNDQTIELEKKFETQKYLSPPE |
| | | RKRLAKMLQLSERQVKTWFQNRRAKWRRLKQENPQSN |
| | | KKE |
| 420 | HERC2_ | IAIATGSLHCVCCTEDGEVYTWGDNDEGQLGDGTTNAI |
| | HUMAN | QRPRLVAALQGKKVNRVACGSAHTLAWSTSKPASAGK |
| | | LPAQV |
| 421 | GSX2_HUMAN | GGSDASQVPNGKRMRTAFTSTQLLELEREFSSNMYLSRL |
| | | RRIEIATYLNLSEKQVKIWFQNRRVKHKKEGKGTQRNSH |
| | | AG |
| 422 | BIN1_HUMAN | RLDLPPGFMFKVQAQHDYTATDTDELQLKAGDVVLVIP |
| | | FQNPEEQDEGWLMGVKESDWNQHKELEKCRGVFPENF |
| | | TERVP |
| 423 | ETV7_HUMAN | GICKLPGRLRIQPALWSREDVLHWLRWAEQEYSLPCTAE |
| | | HGFEMNGRALCILTKDDFRHRAPSSGDVLYELLQYIKTQ |
| | | RR |
| 424 | ASCL3_HUMAN | PNYRGCEYSYGPAFTRKRNERERQRVKCVNEGYAQLRH |
| | | HLPEEYLEKRLSKVETLRAAIKYINYLQSLLYPDKAETK |
| | | NNP |
| 425 | PHC1_HUMAN | LHGINPVFLSSNPSRWSVEEVYEFIASLQGCQEIAEEFRSQ |
| | | EIDGQALLLLKEEHLMSAMNIKLGPALKICAKINVLKET |
| 426 | OTP_HUMAN | QAGQQQGQQKQKRHRTRFTPAQLNELERSFAKTHYPDI |
| | | FMREELALRIGLTESRVQVWFQNRRAKWKKRKKTTNVF |
| | | RAPG |
| 427 | I2BP2_HUMAN | AAAVAVAAASRRQSCYLCDLPRMPWAMIWDFTEPVCR |
| | | GCVNYEGADRVEFVIETARQLKRAHGCFPEGRSPPGAA |
| | | ASAAA |
| 428 | VGLL2_ | FSSQTPASIKEEEGSPEKERPPEAEYINSRCVLFTYFQGDI |
| | HUMAN | SSVVDEHFSRALSQPSSYSPSCTSSKAPRSSGPWRDCSF |
| 429 | HXA11_ | DKAGGSSGQRTRKKRCPYTKYQIRELEREFFFSVYINKE |
| | HUMAN | KRLQLSRMLNLTDRQVKIWFQNRRMKEKKINRDRLQYY |
| | | SAN |
| 430 | PDLI4_HUMAN | GAPLSGLQGLPECTRCGHGIVGTIVKARDKLYHPECFMC |
| | | SDCGLNLKQRGYFFLDERLYCESHAKARVKPPEGYDVV |
| | | AVY |
| 431 | ASCL2_HUMAN | RRPATAETGGGAAAVARRNERERNRVKLVNLGFQALR |
| | | QHVPHGGASKKLSKVETLRSAVEYIRALQRLLAEHDAV |
| | | RNALA |
| 432 | CDX4_HUMAN | TVQVTGKTRTKEKYRVVYTDHQRLELEKEFHCNRYITIQ |
| | | RKSELAVNLGLSERQVKIWFQNRRAKERKMIKKKISQFE |
| | | NS |
| 433 | ZN860_HUMAN | EEAAQKRKEKEPGMALPQGHLTFRDVAIEFSLEEWKCL |
| | | DPTQRALYRAMMLENYRNLHSVDISSKCMMKKESSTAQ |
| | | GNTE |
| 434 | LMBL4_ | DIRASQVARWTVDEVAEFVQSLLGCEEHAKCFKKEQID |
| | HUMAN | GKAFLLLTQTDIVKVMKIKLGPALKIYNSILMFRHSQELP |
| | | EE |
| 435 | PDIP3_HUMAN | LSPLEGTKMTVNNLHPRVTEEDIVELFCVCGALKRARLV |
| | | HPGVAEVVFVKKDDAITAYKKYNNRCLDGQPMKCNLH |
| | | MNGN |
| 436 | NKX25_ | DNAERPRARRRRKPRVLFSQAQVYELERRFKQQRYLSA |
| | HUMAN | PERDQLASVLKLTSTQVKIWFQNRRYKCKRQRQDQTLE |
| | | LVGL |
| 437 | CEBPB_ | SQVKSKAKKTVDKHSDEYKIRRERNNIAVRKSRDKAKM |
| | HUMAN | RNLETQHKVLELTAENERLQKKVEQLSRELSTLRNLFKQ |
| | | LPE |
| 438 | ISL1_HUMAN | KRDYIRLYGIKCAKCSIGFSKNDFVMRARSKVYHIECFR |
| | | CVACSRQLIPGDEFALREDGLFCRADHDVVERASLGAG |
| | | DPL |
| 439 | CDX2_HUMAN | SLGSQVKTRTKDKYRVVYTDHQRLELEKEFHYSRYITIR |
| | | RKAELAATLGLSERQVKIWFQNRRAKERKINKKKLQQQ |
| | | QQQ |
| 440 | PROP1_HUMAN | QGGQRGRPHSRRRHRTTFSPVQLEQLESAFGRNQYPDIW |
| | | ARESLARDTGLSEARIQVWFQNRRAKQRKQERSLLQPL |
| | | AHL |
| 441 | SIN3B_HUMAN | DALTYLDQVKIRFGSDPATYNGFLEIMKEFKSQSIDTPGV |
| | | IRRVSQLFHEHPDLIVGFNAFLPLGYRIDIPKNGKLNIQS |
| 442 | SMBT1_ | RLHLDSNPLKWSVADVVRFIRSTDCAPLARIFLDQEIDGQ |
| | HUMAN | ALLLLTLPTVQECMDLKLGPAIKLCHHIERIKFAFYEQFA |
| 443 | HXC11_ | AKGAAPNAPRTRKKRCPYSKFQIRELEREFFFNVYINKE |
| | HUMAN | KRLQLSRMLNLTDRQVKIWFQNRRMKEKKLSRDRLQYF |
| | | SGN |
| 444 | HXC10_ | TTGNWLTAKSGRKKRCPYTKHQTLELEKEFLFNMYLTR |
| | HUMAN | ERRLEISKTINLTDRQVKIWFQNRRMKLKKMNRENRIRE |
| | | LTS |
| 445 | PRS6A_HUMAN | YLVSNVIELLDVDPNDQEEDGANIDLDSQRKGKCAVIKT |
| | | STRQTYFLPVIGLVDAEKLKPGDLVGVNKDSYLILETLPT |
| | | E |
| 446 | VSX1_HUMAN | KASPTLGKRKKRRHRTVFTAHQLEELEKAFSEAHYPDV |
| | | YAREMLAVKTELPEDRIQVWFQNRRAKWRKREKRWGG |
| | | SSVMA |
| 447 | NKX23_ | EESERPKPRSRRKPRVLFSQAQVFELERRFKQQRYLSAPE |
| | HUMAN | REHLASSLKLTSTQVKIWFQNRRYKCKRQRQDKSLELG |
| | | AH |
| 448 | MTG16_ | VVPGSRQEEVIDHKLTEREWAEEWKHLNNLLNCIMDMV |
| | HUMAN | EKTRRSLTVLRRCQEADREELNHWARRYSDAEDTKKGP |
| | | APAA |
| 449 | HMX3_HUMAN | ESPEKKPACRKKKTRTVFSRSQVFQLESTFDMKRYLSSS |
| | | ERAGLAASLHLTETQVKIWFQNRRNKWKRQLAAELEAA |
| | | NLS |
| 450 | HMX1_HUMAN | RGGVGVGGGRKKKTRTVFSRSQVFQLESTFDLKRYLSS |
| | | AERAGLAASLQLTETQVKIWFQNRRNKWKRQLAAELEA |
| | | ASLS |
| 451 | KIF22_HUMAN | ELLAHGRQKILDLLNEGSARDLRSLQRIGPKKAQLIVGW |
| | | RELHGPFSQVEDLERVEGITGKQMESFLKANILGLAAGQ |
| | | RC |
| 452 | CSTF2_HUMAN | ESPYGETISPEDAPESISKAVASLPPEQMFELMKQMKLCV |
| | | QNSPQEARNMLLQNPQLAYALLQAQVVMRIVDPEIALKI |
| | | L |
| 453 | CEBPE_ | AGPLHKGKKAVNKDSLEYRLRRERNNIAVRKSRDKAKR |
| | HUMAN | RILETQQKVLEYMAENERLRSRVEQLTQELDTLRNLFRQ |
| | | IPE |
| 454 | DLX2_HUMAN | IRIVNGKPKKVRKPRTIYSSFQLAALQRRFQKTQYLALPE |
| | | RAELAASLGLTQTQVKIWFQNRRSKFKKMWKSGEIPSE |
| | | QH |
| 455 | ZMYM3_ | TVYQFCSPSCWTKFQRTSPEGGIHLSCHYCHSLFSGKPEV |
| | HUMAN | LDWQDQVFQFCCRDCCEDFKRLRGVVSQCEHCRQEKLL |
| | | HE |
| 456 | PPARG_ | TMVDTEMPFWPTNFGISSVDLSVMEDHSHSFDIKPFTTV |
| | HUMAN | DFSSISTPHYEDIPFTRTDPVVADYKYDLKLQEYQSAIKV |
| | | E |
| 457 | PRIC1_HUMAN | GRHHAELLKPRCSACDEIIFADECTEAEGRHWHMKHFC |
| | | CLECETVLGGQRYIMKDGRPFCCGCFESLYAEYCETCGE |
| | | HIG |
| 458 | UNC4_HUMAN | DPDKESPGCKRRRTRTNFTGWQLEELEKAFNESHYPDVF |
| | | MREALALRLDLVESRVQVWFQNRRAKWRKKENTKKGP |
| | | GRPA |
| 459 | BARX2_ | TEQPTPRQKKPRRSRTIFTELQLMGLEKKFQKQKYLSTP |
| | HUMAN | DRLDLAQSLGLTQLQVKTWYQNRRMKWKKMVLKGGQ |
| | | EAPTK |
| 460 | ALX3_HUMAN | SMELAKNKSKKRRNRTTFSTFQLEELEKVFQKTHYPDV |
| | | YAREQLALRTDLTEARVQVWFQNRRAKWRKRERYGKI |
| | | QEGRN |
| 461 | TCF15_HUMAN | GGGGGAGPVVVVRQRQAANARERDRTQSVNTAFTALR |
| | | TLIPTEPVDRKLSKIETVRLASSYIAHLANVLLLGDSADD |
| | | GQP |
| 462 | TERA_HUMAN | IDDTVEGITGNLFEVYLKPYFLEAYRPIRKGDIFLVRGGM |
| | | RAVEFKVVETDPSPYCIVAPDTVIHCEGEPIKREDEEESL |
| 463 | VSX2_HUMAN | SALNQTKKRKKRRHRTIFTSYQLEELEKAFNEAHYPDVY |
| | | AREMLAMKTELPEDRIQVWFQNRRAKWRKREKCWGRS |
| | | SVMA |
| 464 | HXD12_ | DGLPWGAAPGRARKKRKPYTKQQIAELENEFLVNEFINR |
| | HUMAN | QKRKELSNRLNLSDQQVKIWFQNRRMKKKRVVLREQA |
| | | LALY |
| 465 | CDX1_HUMAN | GGGGSGKTRTKDKYRVVYTDHQRLELEKEFHYSRYITIR |
| | | RKSELAANLGLTERQVKIWFQNRRAKERKVNKKKQQQ |
| | | QQPP |
| 466 | TCF23_HUMAN | TRAGGLALGRSEASPENAARERSRVRTLRQAFLALQAAL |
| | | PAVPPDTKLSKLDVLVLAASYIAHLTRTLGHELPGPAWP |
| | | PF |
| 467 | ALX1_HUMAN | KCDSNVSSSKKRRHRTTFTSLQLEELEKVFQKTHYPDVY |
| | | VREQLALRTELTEARVQVWFQNRRAKWRKRERYGQIQ |
| | | QAKS |
| 468 | HXA10_ | NAANWLTAKSGRKKRCPYTKHQTLELEKEFLFNMYLTR |
| | HUMAN | ERRLEISRSVHLTDRQVKIWFQNRRMKLKKMNRENRIRE |
| | | LTA |
| 469 | RX_HUMAN | LSEEEQPKKKHRRNRTTFTTYQLHELERAFEKSHYPDVY |
| | | SREELAGKVNLPEVRVQVWFQNRRAKWRRQEKLEVSS |
| | | MKLQ |
| 470 | CXXC5_ | HMAGLAEYPMQGELASAISSGKKKRKRCGMCAPCRRRI |
| | HUMAN | NCEQCSSCRNRKTGHQICKFRKCEELKKKPSAALEKVM |
| | | LPTG |
| 471 | SCML1_ | SITKHPSTWSVEAVVLFLKQTDPLALCPLVDLFRSHEIDG |
| | HUMAN | KALLLLTSDVLLKHLGVKLGTAVKLCYYIDRLKQGKCF |
| | | EN |
| 472 | NFIL3_HUMAN | ACRRKREFIPDEKKDAMYWEKRRKNNEAAKRSREKRRL |
| | | NDLVLENKLIALGEENATLKAELLSLKLKFGLISSTAYAQ |
| | | EI |
| 473 | DLX6_HUMAN | EIRFNGKGKKIRKPRTIYSSLQLQALNHRFQQTQYLALPE |
| | | RAELAASLGLTQTQVKIWFQNKRSKFKKLLKQGSNPHES |
| | | D |
| 474 | MTG8_HUMAN | GLHGTRQEEMIDHRLTDREWAEEWKHLDHLLNCIMDM |
| | | VEKTRRSLTVLRRCQEADREELNYWIRRYSDAEDLKKG |
| | | GGSSS |
| 475 | CBX8_HUMAN | ELSAVGERVFAAEALLKRRIRKGRMEYLVKWKGWSQK |
| | | YSTWEPEENILDARLLAAFEEREREMELYGPKKRGPKPK |
| | | TFLL |
| 476 | CEBPD_ | AREKSAGKRGPDRGSPEYRQRRERNNIAVRKSRDKAKR |
| | HUMAN | RNQEMQQKLVELSAENEKLHQRVEQLTRDLAGLRQFFK |
| | | QLPS |
| 477 | SEC13_HUMAN | SGGCDNLIKLWKEEEDGQWKEEQKLEAHSDWVRDVA |
| | | WAPSIGLPTSTIASCSQDGRVFIWTCDDASSNTWSPKLLH |
| | | KFND |
| 478 | FIP1_HUMAN | VKGVDLDAPGSINGVPLLEVDLDSFEDKPWRKPGADLS |
| | | DYFNYGFNEDTWKAYCEKQKRIRMGLEVIPVTSTTNKIT |
| | | AED |
| 479 | ALX4_HUMAN | KADSESNKGKKRRNRTTFTSYQLEELEKVFQKTHYPDV |
| | | YAREQLAMRTDLTEARVQVWFQNRRAKWRKRERFGQ |
| | | MQQVRT |
| 480 | LHX3_HUMAN | TAKQREAEATAKRPRTTITAKQLETLKSAYNTSPKPARH |
| | | VREQLSSETGLDMRVVQVWFQNRRAKEKRLKKDAGRQ |
| | | RWGQ |
| 481 | PRIC2_HUMAN | GRHHAECLKPRCAACDEIIFADECTEAEGRHWHMKHFC |
| | | CFECETVLGGQRYIMKEGRPYCCHCFESLYAEYCDTCA |
| | | QHIG |
| 482 | MAGI3_ | IIGGDRPDEFLQVKNVLKDGPAAQDGKIAPGDVIVDING |
| | HUMAN | NCVLGHTHADVVQMFQLVPVNQYVNLTLCRGYPLPDD |
| | | SEDP |
| 483 | NELL1_HUMAN | CCPECDTRVTSQCLDQNGHKLYRSGDNWTHSCQQCRCL |
| | | EGEVDCWPLTCPNLSCEYTAILEGECCPRCVSDPCLADNI |
| | | TY |
| 484 | PRRX1_ | LNSEEKKKRKQRRNRTTFNSSQLQALERVFERTHYPDAF |
| | HUMAN | VREDLARRVNLTEARVQVWFQNRRAKFRRNERAMLAN |
| | | KNAS |
| 485 | MTG8R_ | GLNGGYQDELVDHRLTEREWADEWKHLDHALNCIMEM |
| | HUMAN | VEKTRRSMAVLRRCQESDREELNYWKRRYNENTELRKT |
| | | GTELV |
| 486 | RAX2_HUMAN | GPGEEAPKKKHRRNRTTFTTYQLHQLERAFEASHYPDV |
| | | YSREELAAKVHLPEVRVQVWFQNRRAKWRRQERLESG |
| | | SGAVA |
| 487 | DLX3_HUMAN | VRMVNGKPKKVRKPRTIYSSYQLAALQRRFQKAQYLAL |
| | | PERAELAAQLGLTQTQVKIWFQNRRSKFKKLYKNGEVP |
| | | LEHS |
| 488 | DLX1_HUMAN | EVRFNGKGKKIRKPRTIYSSLQLQALNRRFQQTQYLALP |
| | | ERAELAASLGLTQTQVKIWFQNKRSKFKKLMKQGGAAL |
| | | EGS |
| 489 | NKX26_ | GRSEQPKARQRRKPRVLFSQAQVLALERRFKQQRYLSA |
| | HUMAN | PEREHLASALQLTSTQVKIWFQNRRYKCKRQRQDKSLEL |
| | | AGH |
| 490 | NAB1_HUMAN | LPRTLGELQLYRILQKANLLSYFDAFIQQGGDDVQQLCE |
| | | AGEEEFLEIMALVGMASKPLHVRRLQKALRDWVTNPGL |
| | | FNQ |
| 491 | SAMD7_ | NLSLDEDIQKWTVDDVHSFIRSLPGCSDYAQVFKDHAID |
| | HUMAN | GETLPLLTEEHLRGTMGLKLGPALKIQSQVSQHVGSMFY |
| | | KK |
| 492 | PITX3_HUMAN | SPEDGSLKKKQRRQRTHFTSQQLQELEATFQRNRYPDM |
| | | STREEIAVWTNLTEARVRVWFKNRRAKWRKRERSQQA |
| | | ELCKG |
| 493 | WDR5_HUMAN | SNLLVSASDDKTLKIWDVSSGKCLKTLKGHSNYVFCCNF |
| | | NPQSNLIVSGSFDESVRIWDVKTGKCLKTLPAHSDPVSA |
| | | VH |
| 494 | MEOX2_ | GNYKSEVNSKPRKERTAFTKEQIRELEAEFAHHNYLTRL |
| | HUMAN | RRYEIAVNLDLTERQVKVWFQNRRMKWKRVKGGQQG |
| | | AAARE |
| 495 | NAB2_HUMAN | LPRTLGELQLYRVLQRANLLSYYETFIQQGGDDVQQLCE |
| | | AGEEEFLEIMALVGMATKPLHVRRLQKALREWATNPGL |
| | | FSQ |
| 496 | DHX8_HUMAN | PEEPTIGDIYNGKVTSIMQFGCFVQLEGLRKRWEGLVHIS |
| | | ELRREGRVANVADVVSKGQRVKVKVLSFTGTKTSLSMK |
| | | DV |
| 497 | FOXA2_ | YAFNHPFSINNLMSSEQQHHHSHHHHQPHKMDLKAYEQ |
| | HUMAN | VMHYPGYGSPMPGSLAMGPVTNKTGLDASPLAADTSY |
| | | YQGVY |
| 498 | CBX6_HUMAN | TAAAGPAPPTAPEPAGASSEPEAGDWRPEMSPCSNVVVT |
| | | DVTSNLLTVTIKEFCNPEDFEKVAAGVAGAAGGGGSIGA |
| | | SK |
| 499 | EMX2_HUMAN | FLLHNALARKPKRIRTAFSPSQLLRLEHAFEKNHYVVGA |
| | | ERKQLAHSLSLTETQVKVWFQNRRTKFKRQKLEEEGSD |
| | | SQQ |
| 500 | CPSF6_HUMAN | KRIALYIGNLTWWTTDEDLTEAVHSLGVNDILEIKFFENR |
| | | ANGQSKGFALVGVGSEASSKKLMDLLPKRELHGQNPVV |
| | | TP |
| 501 | HXC12_ | SGAPWYPINSRSRKKRKPYSKLQLAELEGEFLVNEFITRQ |
| | HUMAN | RRRELSDRLNLSDQQVKIWFQNRRMKKKRLLLREQALS |
| | | FF |
| 502 | KDM4B_ | SDNLYPESITSRDCVQLGPPSEGELVELRWTDGNLYKAK |
| | HUMAN | FISSVTSHIYQVEFEDGSQLTVKRGDIFTLEEELPKRVRSR |
| 503 | LMBL3_ | GIPASKVSKWSTDEVSEFIQSLPGCEEHGKVFKDEQIDGE |
| | HUMAN | AFLLMTQTDIVKIMSIKLGPALKIFNSILMFKAAEKNSHN |
| 504 | PHX2A_ | EPSGLHEKRKQRRIRTTFTSAQLKELERVFAETHYPDIYT |
| | HUMAN | REELALKIDLTEARVQVWFQNRRAKFRKQERAASAKGA |
| | | AG |
| 505 | EMX1_HUMAN | LLLHGPFARKPKRIRTAFSPSQLLRLERAFEKNHYVVGA |
| | | ERKQLAGSLSLSETQVKVWFQNRRTKYKRQKLEEEGPE |
| | | SEQ |
| 506 | NC2B_HUMAN | SSGNDDDLTIPRAAINKMIKETLPNVRVANDARELVVNC |
| | | CTEFIHLISSEANEICNKSEKKTISPEHVIQALESLGFGSY |
| 507 | DLX4_HUMAN | ERRPQAPAKKLRKPRTIYSSLQLQHLNQRFQHTQYLALP |
| | | ERAQLAAQLGLTQTQVKIWFQNKRSKYKKLLKQNSGG |
| | | QEGD |
| 508 | SRY_HUMAN | NVQDRVKRPMNAFIVWSRDQRRKMALENPRMRNSEISK |
| | | QLGYQWKMLTEAEKWPFFQEAQKLQAMHREKYPNYK |
| | | YRPRRK |
| 509 | ZN777_HUMAN | EITRLAVWAAVQAVERKLEAQAMRLLTLEGRTGTNEKK |
| | | IADCEKTAVEFANHLESKWVVLGTLLQEYGLLQRRLEN |
| | | MENL |
| 510 | NELL1_HUMAN | CEKDIDECSEGIIECHNHSRCVNLPGWYHCECRSGFHDD |
| | | GTYSLSGESCIDIDECALRTHTCWNDSACINLAGGEDCLC |
| | | P |
| 511 | ZN398_HUMAN | AAISLWTVVAAVQAIERKVEIHSRRLLHLEGRTGTAEKK |
| | | LASCEKTVTELGNQLEGKWAVLGTLLQEYGLLQRRLEN |
| | | LEN |
| 512 | GATA3_ | GQNRPLIKPKRRLSAARRAGTSCANCQTTTTTLWRRNA |
| | HUMAN | NGDPVCNACGLYYKLHNINRPLTMKKEGIQTRNRKMSS |
| | | KSKK |
| 513 | BSH_HUMAN | HAELPGKHCRRRKARTVFSDSQLSGLEKRFEIQRYLSTPE |
| | | RVELATALSLSETQVKTWFQNRRMKHKKQLRKSQDEPK |
| | | AP |
| 514 | SF3B4_HUMAN | QDATVYVGGLDEKVSEPLLWELFLQAGPVVNTHMPKD |
| | | RVTGQHQGYGFVEFLSEEDADYAIKIMNMIKLYGKPIRV |
| | | NKAS |
| 515 | TEAD1_ | PIDNDAEGVWSPDIEQSFQEALAIYPPCGRRKIILSDEGK |
| | HUMAN | MYGRNELIARYIKLRTGKTRTRKQVSSHIQVLARRKSRD |
| | | F |
| 516 | TEAD3_ | GLDNDAEGVWSPDIEQSFQEALAIYPPCGRRKIILSDEGK |
| | HUMAN | MYGRNELIARYIKLRTGKTRTRKQVSSHIQVLARKKVRE |
| | | Y |
| 517 | RGAP1_ | DSVGTPQSNGGMRLHDFVSKTVIKPESCVPCGKRIKFGK |
| | HUMAN | LSLKCRDCRVVSHPECRDRCPLPCIPTLIGTPVKIGEGML |
| | | A |
| 518 | PHF1_HUMAN | SAPHSMTASSSSVSSPSPGLPRRSAPPSPLCRSLSPGTGGG |
| | | VRGGVGYLSRGDPVRVLARRVRPDGSVQYLVEWGGGG |
| | | IF |
| 519 | FOXA1_ | GDPHYSFNHPFSINNLMSSSEQQHKLDFKAYEQALQYSP |
| | HUMAN | YGSTLPASLPLGSASVTTRSPIEPSALEPAYYQGVYSRPV |
| | | L |
| 520 | GATA2_ | GQNRPLIKPKRRLSAARRAGTCCANCQTTTTTLWRRNA |
| | HUMAN | NGDPVCNACGLYYKLHNVNRPLTMKKEGIQTRNRKMS |
| | | NKSKK |
| 521 | FOXO3_ | DSLSGSSLYSTSANLPVMGHEKFPSDLDLDMFNGSLECD |
| | HUMAN | MESIIRSELMDADGLDFNFDSLISTQNVVGLNVGNFTGA |
| | | KQ |
| 522 | ZN212_HUMAN | TEISLWTVVAAIQAVEKKMESQAARLQSLEGRTGTAEK |
| | | KLADCEKMAVEFGNQLEGKWAVLGTLLQEYGLLQRRL |
| | | ENVEN |
| 523 | IRX4_HUMAN | MDSGTRRKNATRETTSTLKAWLQEHRKNPYPTKGEKIM |
| | | LAIITKMTLTQVSTWFANARRRLKKENKMTWPPRNKCA |
| | | DEKR |
| 524 | ZBED6_ | NIEKQIYLPSTRAKTSIVWHFFHVDPQYTWRAICNLCEKS |
| | HUMAN | VSRGKPGSHLGTSTLQRHLQARHSPHWTRANKFGVASG |
| | | EE |
| 525 | LHX4_HUMAN | AKQNDDSEAGAKRPRTTITAKQLETLKNAYKNSPKPAR |
| | | HVREQLSSETGLDMRVVQVWFQNRRAKEKRLKKDAGR |
| | | HRWGQ |
| 526 | SIN3A_HUMAN | DALSYLDQVKLQFGSQPQVYNDFLDIMKEFKSQSIDTPG |
| | | VISRVSQLFKGHPDLIMGFNTFLPPGYKIEVQTNDMVNV |
| | | TT |
| 527 | RBBP7_HUMAN | DDHTVCLWDINAGPKEGKIVDAKAIFTGHSAVVEDVAW |
| | | HLLHESLFGSVADDQKLMIWDTRSNTTSKPSHLVDAHT |
| | | AEVN |
| 528 | NKX61_ | GSILLDKDGKRKHTRPTFSGQQIFALEKTFEQTKYLAGPE |
| | HUMAN | RARLAYSLGMTESQVKVWFQNRRTKWRKKHAAEMAT |
| | | AKKK |
| 529 | TRI68_HUMAN | DPTALVEAIVEEVACPICMTFLREPMSIDCGHSFCHSCLS |
| | | GLWEIPGESQNWGYTCPLCRAPVQPRNLRPNWQLANVV |
| | | EK |
| 530 | R51A1_HUMAN | QSLPKKVSLSSDTTRKPLEIRSPSAESKKPKWVPPAASGG |
| | | SRSSSSPLVVVSVKSPNQSLRLGLSRLARVKPLHPNATST |
| 531 | MB3L1_ | AKSSQRKQRDCVNQCKSKPGLSTSIPLRMSSYTFKRPVT |
| | HUMAN | RITPHPGNEVRYHQWEESLEKPQQVCWQRRLQGLQAYS |
| | | SAG |
| 532 | DLX5_HUMAN | VRMVNGKPKKVRKPRTIYSSFQLAALQRRFQKTQYLAL |
| | | PERAELAASLGLTQTQVKIWFQNKRSKIKKIMKNGEMPP |
| | | EHS |
| 533 | NOTC1_ | LQCNNHACGWDGGDCSLNFNDPWKNCTQSLQCWKYFS |
| | HUMAN | DGHCDSQCNSAGCLFDGFDCQRAEGQCNPLYDQYCKD |
| | | HFSDGH |
| 534 | TERF2_HUMAN | ETWVEEDELFQVQAAPDEDSTTNITKKQKWTVEESEWV |
| | | KAGVQKYGEGNWAAISKNYPFVNRTAVMIKDRWRTMK |
| | | RLGMN |
| 535 | ZN282_HUMAN | AEISLWTVVAAIQAVERKVDAQASQLLNLEGRTGTAEK |
| | | KLADCEKTAVEFGNHMESKWAVLGTLLQEYGLLQRRL |
| | | ENLEN |
| 536 | RGS12_HUMAN | LEKRTLFRLDLVPINRSVGLKAKPTKPVTEVLRPVVARY |
| | | GLDLSGLLVRLSGEKEPLDLGAPISSLDGQRVVLEEKDPS |
| | | R |
| 537 | ZN840_HUMAN | PNCLSSSMQLPHGGGRHQELVRFRDVAVVFSPEEWDHL |
| | | TPEQRNLYKDVMLDNCKYLASLGNWTYKAHVMSSLKQ |
| | | GKEPW |
| 538 | SPI2B_HUMAN | DDYKEGDLRIMPESSESPPTEREPGGVVDGLIGKHVEYT |
| | | KEDGSKRIGMVIHQVEAKPSVYFIKFDDDFHIYVYDLVK |
| | | KS |
| 539 | PAX7_HUMAN | SEPDLPLKRKQRRSRTTFTAEQLEELEKAFERTHYPDIYT |
| | | REELAQRTKLTEARVQVWFSNRRARWRKQAGANQLAA |
| | | FNH |
| 540 | NKX62_ | AGGVLDKDGKKKHSRPTFSGQQIFALEKTFEQTKYLAGP |
| | HUMAN | ERARLAYSLGMTESQVKVWFQNRRTKWRKRHAVEMAS |
| | | AKKK |
| 541 | ASXL2_ | DVMSFSVTVTTIPASQAMNPSSHGQTIPVQAFSEENSIEG |
| | HUMAN | TPSKCYCRLKAMIMCKGCGAFCHDDCIGPSKLCVSCLV |
| | | VR |
| 542 | FOXO1_ | GGYSSVSSCNGYGRMGLLHQEKLPSDLDGMFIERLDCD |
| | HUMAN | MESIIRNDLMDGDTLDFNFDNVLPNQSFPHSVKTTTHSW |
| | | VSG |
| 543 | GATA3_ | GGSPTGFGCKSRPKARSSTGRECVNCGATSTPLWRRDGT |
| | HUMAN | GHYLCNACGLYHKMNGQNRPLIKPKRRLSAARRAGTSC |
| | | ANC |
| 544 | GATA1_ | GQNRPLIRPKKRLIVSKRAGTQCTNCQTTTTTLWRRNAS |
| | HUMAN | GDPVCNACGLYYKLHQVNRPLTMRKDGIQTRNRKASG |
| | | KGKK |
| 545 | ZMYM5_ | PVALLRKQNFQPTAQQQLTKPAKITCANCKKPLQKGQT |
| | HUMAN | AYQRKGSAHLFCSTTCLSSFSHKRTQNTRSIICKKDASTK |
| | | KA |
| 546 | ZN783_HUMAN | TEITLWTVVAAIQALEKKVDSCLTRLLTLEGRTGTAEKK |
| | | LADCEKTAVEFGNQLEGKWAVLGTLLQEYGLLQRRLEN |
| | | VEN |
| 547 | SPI2B_HUMAN | KKQRGRPSSQPRRNIVGCRISHGWKEGDEPITQWKGTVL |
| | | DQVPINPSLYLVKYDGIDCVYGLELHRDERVLSLKILSDR |
| | | V |
| 548 | LRP1_HUMAN | WTCDLDDDCGDRSDESASCAYPTCFPLTQFTCNNGRCIN |
| | | INWRCDNDNDCGDNSDEAGCSHSCSSTQFKCNSGRCIPE |
| | | HW |
| 549 | MIXL1_HUMAN | PKGAAAPSASQRRKRTSFSAEQLQLLELVFRRTRYPDIHL |
| | | RERLAALTLLPESRIQVWFQNRRAKSRRQSGKSFQPLAR |
| | | P |
| 550 | SGT1_HUMAN | KIKYDWYQTESQVVITLMIKNVQKNDVNVEFSEKELSAL |
| | | VKLPSGEDYNLKLELLHPIIPEQSTFKVLSTKIEIKLKKPE |
| 551 | LMCD1_ | DPSKEVEYVCELCKGAAPPDSPVVYSDRAGYNKQWHPT |
| | HUMAN | CFVCAKCSEPLVDLIYFWKDGAPWCGRHYCESLRPRCS |
| | | GCDE |
| 552 | CEBPA_ | GSGAGKAKKSVDKNSNEYRVRRERNNIAVRKSRDKAK |
| | HUMAN | QRNVETQQKVLELTSDNDRLRKRVEQLSRELDTLRGIFR |
| | | QLPE |
| 553 | GATA2_ | GPASSFTPKQRSKARSCSEGRECVNCGATATPLWRRDGT |
| | HUMAN | GHYLCNACGLYHKMNGQNRPLIKPKRRLSAARRAGTCC |
| | | ANC |
| 554 | SOX14_HUMAN | KPSDHIKRPMNAFMVWSRGQRRKMAQENPKMHNSEIS |
| | | KRLGAEWKLLSEAEKRPYIDEAKRLRAQHMKEHPDYKY |
| | | RPRRK |
| 555 | WTIP_HUMAN | LYSGFQQTADKCSVCGHLIMEMILQALGKSYHPGCFRCS |
| | | VCNECLDGVPFTVDVENNIYCVRDYHTVFAPKCASCAR |
| | | PIL |
| 556 | PRP19_HUMAN | HPSQDLVFSASPDATIRIWSVPNASCVQVVRAHESAVTG |
| | | LSLHATGDYLLSSSDDQYWAFSDIQTGRVLTKVTDETSG |
| | | CS |
| 557 | CBX6_HUMAN | ELSAVGERVFAAESIIKRRIRKGRIEYLVKWKGWAIKYST |
| | | WEPEENILDSRLIAAFEQKERERELYGPKKRGPKPKTFLL |
| 558 | NKX11_ | RTGSDSKSGKPRRARTAFTYEQLVALENKFKATRYLSVC |
| | HUMAN | ERLNLALSLSLTETQVKIWFQNRRTKWKKQNPGADTSA |
| | | PTG |
| 559 | RBBP4_HUMAN | VWDLSKIGEEQSPEDAEDGPPELLFIHGGHTAKISDFSWN |
| | | PNEPWVICSVSEDNIMQVWQMAENIYNDEDPEGSVDPE |
| | | GQ |
| 560 | DMRT2_ | ERCTPAGGGAEPRKLSRTPKCARCRNHGVVSCLKGHKR |
| | HUMAN | FCRWRDCQCANCLLVVERQRVMAAQVALRRQQATEDK |
| | | KGLSG |
| 561 | SMCA2_ | SQPGALIPGDPQAMSQPNRGPSPFSPVQLHQLRAQILAY |
| | HUMAN | KMLARGQPLPETLQLAVQGKRTLPGLQQQQQQQQQQQ |
| | | QQQQ |
| 562 | ZNF10 | MDAKSLTAWSRTLVTFKDVFVDFTREEWKLLDTAQQIV |
| | | YRNVMLENYKNLVSLGYQLTKPDVILRLEKGEEPWLVE |
| | | REIHQETHPDSETAFEIKSSVSSRSIFKDKQSCDIKMEGM |
| | | ARNDLWYLSLEEVWKCRDQLDKYQENPERHLRQVAFT |
| | | QKKVLTQERVSESGKYGGNCLLPAQLVLREYFHKRDSH |
| | | TKSLKHDLVLNGHQDSCASNSNECGQTFCQNIHLIQFAR |
| | | THTGDKSYKCPDNDNSLTHGSSLGISKGIHREKPYECKE |
| | | CGKFFSWRSNLTRHQLIHTGEKPYECKECGKSFSRSSHLI |
| | | GHQKTHTGEEPYECKECGKSFSWFSHLVTHQRTHTGDK |
| | | LYTCNQCGKSFVHSSRLIRHQRTHTGEKPYECPECGKSF |
| | | RQSTHLILHQRTHVRVRPYECNECGKSYSQRSHLVVHHR |
| | | IHTGLKPFECKDCGKCFSRSSHLYSHQRTHTGEKPYECH |
| | | DCGKSFSQSSALIVHQRIHTGEKPYECCQCGKAFIRKNDL |
| | | IKHQRIHVGEETYKCNQCGIIFSQNSPFIVHQIAHTGEQFL |
| | | TCNQCGTALVNTSNLIGYQTNHIRENAY |
| 563 | EED_HUMAN | MSEREVSTAPAGTDMPAAKKQKLSSDENSNPDLSGDEN |
| | | DDAVSIESGTNTERPDTPTNTPNAPGRKSWGKGKWKSK |
| | | KCKYSFKCVNSLKEDHNQPLFGVQFNWHSKEGDPLVFA |
| | | TVGSNRVTLYECHSQGEIRLLQSYVDADADENFYTCAW |
| | | TYDSNTSHPLLAVAGSRGIIRIINPITMQCIKHYVGHGNAI |
| | | NELKFHPRDPNLLLSVSKDHALRLWNIQTDTLVAIFGGV |
| | | EGHRDEVLSADYDLLGEKIMSCGMDHSLKLWRINSKRM |
| | | MNAIKESYDYNPNKTNRPFISQKIHFPDFSTRDIHRNYVD |
| | | CVRWLGDLILSKSCENAIVCWKPGKMEDDIDKIKPSESN |
| | | VTILGRFDYSQCDIWYMRFSMDFWQKMLALGNQVGKL |
| | | YVWDLEVEDPHKAKCTTLTHHKCGAAIRQTSFSRDSSILI |
| | | AVCDDASIWRWDRLR |
| 564 | RCOR1_ | MPAMVEKGPEVSGKRRGRNNAAASASAAAASAAASAA |
| | HUMAN | CASPAATAASGAAASSASAAAASAAAAPNNGQNKSLAA |
| | | AAPNGNSSSNSWEEGSSGSSSDEEHGGGGMRVGPQYQA |
| | | VVPDFDPAKLARRSQERDNLGMLVWSPNQNLSEAKLDE |
| | | YIAIAKEKHGYNMEQALGMLFWHKHNIEKSLADLPNFT |
| | | PFPDEWTVEDKVLFEQAFSFHGKTFHRIQQMLPDKSIAS |
| | | LVKFYYSWKKTRTKTSVMDRHARKQKREREESEDELEE |
| | | ANGNNPIDIEVDQNKESKKEVPPTETVPQVKKEKHSTQA |
| | | KNRAKRKPPKGMFLSQEDVEAVSANATAATTVLRQLD |
| | | MELVSVKRQIQNIKQTNSALKEKLDGGIEPYRLPEVIQKC |
| | | NARWTTEEQLLAVQAIRKYGRDFQAISDVIGNKSVVQV |
| | | KNFFVNYRRRFNIDEVLQEWEAEHGKEETNGPSNQKPV |
| | | KSPDNSIKMPEEEDEAPVLDVRYASAS |
| 565 | KOX1/ZNF10 | TGRTLVTFKDVFVDFTREEWKLLDTAQQIVYRNVMLEN |
| | KRAB 1 | YKNLVSLGYQLTKPDVILRLEKGEEPLEINLWITKFVKD |
| 566 | KOX1/ZNF10 | MYPYDVPDYASPKKKRKVGGGASMDAKSLTAWSRTLV |
| | KRAB 2 | TFKDVFVDFTREEWKLLDTAQQIVYRNVMLENYKNLVS |
| | | LGYQLTKPDVILRLEKGEEPWLVEREIHQETHPDSETAFE |
| | | IKSSV |
| 567 | KOX1/ZNF10 | ALSPQHSAVTQGSIIKNKEGMDAKSLTAWSRTLVTFKDV |
| | KRAB 3 | FVDFTREEWKLLDTAQQIVYRNVMLENYKNLVSLGYQL |
| | | TKPDVILRLEKGEEPWLVEREIHQETHPDSETAFEIKSSV |
| 568 | KOX1/ZNF10 (aa | RTLVTFKDVFVDFTREEWKLLDTAQQIVYRNVMLENYK |
| | 11-72) | NLVSLGYQLTKPDVILRLEKGEEP |
| 569 | KOX1/ZNF10 (aa | RTLVTFKDVFVDFTREEWKLLDTAQQIVYRNVMLENYK |
| | 11-108) | NLVSLGYQLTKPDVILRLEKGEEPWLVEREIHQETHPDSE |
| | | TAFEIKSSVSSRSIFKDKQS |
| 570 | KOX1/ZNF10 | RTLVTFKDVAVDFTQEEWQQLDPAQKIVYRDVMLENYS |
| | variant | NLVSVGYQLTKPDVILRLEQKGEEPWLVEEEIHQETHPD |
| | | SETAFEIKSSVSSRSIFKDKQS |
| 571 | KOX1 KRAB- | RTLVTFKDVFVDFTREEWKLLDTAQQIVYRNVMLENYK |
| | ZIM3 chimera | NLVSLGYQLTKPDVILRLEKGEEPWLEEEEVLGSGRAEK |
| | | NGDIGGQIWKPKDVKESL |
| 572 | ZIM3-KOX1 | MNNSQGRVTFEDVTVNFTQGEWQRLNPEQRNLYRDVM |
| | KRAB chimera | LENYSNLVSVGQGETTKPDVILRLEQGKEPWLVEREIHQ |
| | | ETHPDSETAFEIKSSVSSRSIFKDKQS |
| 573 | human DNMT1 | MPARTAPARVPTLAVPAISLPDDVRRRLKDLERDSLTEK |
| | | ECVKEKLNLLHEFLQTEIKNQLCDLETKLRKEELSEEGY |
| | | LAKVKSLLNKDLSLENGAHAYNREVNGRLENGNQARSE |
| | | ARRVGMADANSPPKPLSKPRTPRRSKSDGEAKPEPSPSP |
| | | RITRKSTRQTTITSHFAKGPAKRKPQEESERAKSDESIKEE |
| | | DKDQDEKRRRVTSRERVARPLPAEEPERAKSGTRTEKEE |
| | | ERDEKEEKRLRSQTKEPTPKQKLKEEPDREARAGVQAD |
| | | EDEDGDEKDEKKHRSQPKDLAAKRRPEEKEPEKVNPQIS |
| | | DEKDEDEKEEKRRKTTPKEPTEKKMARAKTVMNSKTHP |
| | | PKCIQCGQYLDDPLKYGQHPPDAVDEPQMLTNEKLSIFD |
| | | ANESGFESYEALPQHKLTCFSVYCKHGHLCPIDTGLIEKN |
| | | IELFFSGSAKPIYDDDPSLEGGVNGKNLGPINEWWITGFD |
| | | GGEKALIGFSTSFAEYILMDPSPEYAPIFGLMQEKIYISKI |
| | | VVEFLQSNSDSTYEDLINKIETTVPPSGLNLNRFTEDSLLR |
| | | HAQFVVEQVESYDEAGDSDEQPIFLTPCMRDLIKLAGVT |
| | | LGQRRAQARRQTIRHSTREKDRGPTKATTTKLVYQIFDT |
| | | FFAEQIEKDDREDKENAFKRRRCGVCEVCQQPECGKCK |
| | | ACKDMVKFGGSGRSKQACQERRCPNMAMKEADDDEE |
| | | VDDNIPEMPSPKKMHQGKKKKQNKNRISWVGEAVKTD |
| | | GKKSYYKKVCIDAETLEVGDCVSVIPDDSSKPLYLARVT |
| | | ALWEDSSNGQMFHAHWFCAGTDTVLGATSDPLELFLVD |
| | | ECEDMQLSYIHSKVKVIYKAPSENWAMEGGMDPESLLE |
| | | GDDGKTYFYQLWYDQDYARFESPPKTQPTEDNKFKFCV |
| | | SCARLAEMRQKEIPRVLEQLEDLDSRVLYYSATKNGILY |
| | | RVGDGVYLPPEAFTFNIKLSSPVKRPRKEPVDEDLYPEH |
| | | YRKYSDYIKGSNLDAPEPYRIGRIKEIFCPKKSNGRPNET |
| | | DIKIRVNKFYRPENTHKSTPASYHADINLLYWSDEEAVV |
| | | DFKAVQGRCTVEYGEDLPECVQVYSMGGPNRFYFLEAY |
| | | NAKSKSFEDPPNHARSPGNKGKGKGKGKGKPKSQACEP |
| | | SEPEIEIKLPKLRTLDVESGCGGLSEGFHQAGISDTLWAIE |
| | | MWDPAAQAFRLNNPGSTVFTEDCNILLKLVMAGETTNS |
| | | RGQRLPQKGDVEMLCGGPPCQGFSGMNRFNSRTYSKFK |
| | | NSLVVSFLSYCDYYRPRFFLLENVRNFVSFKRSMVLKLT |
| | | LRCLVRMGYQCTFGVLQAGQYGVAQTRRRAIILAAAPG |
| | | EKLPLFPEPLHVFAPRACQLSVVVDDKKFVSNITRLSSGP |
| | | FRTITVRDTMSDLPEVRNGASALEISYNGEPQSWFQRQL |
| | | RGAQYQPILRDHICKDMSALVAARMRHIPLAPGSDWRD |
| | | LPNIEVRLSDGTMARKLRYTHHDRKNGRSSSGALRGVC |
| | | SCVEAGKACDPAARQFNTLIPWCLPHTGNRHNHWAGLY |
| | | GRLEWDGFFSTTVTNPEPMGKQGRVLHPEQHRVVSVRE |
| | | CARSQGFPDTYRLFGNILDKHRQVGNAVPPPLAKAIGLEI |
| | | KLCMLAKARESASAKIKEEEAAKD |
| 574 | human DNMT3A | MPAMPSSGPGDTSSSAAEREEDRKDGEEQEEPRGKEERQ |
| | | EPSTTARKVGRPGRKRKHPPVESGDTPKDPAVISKSPSM |
| | | AQDSGASELLPNGDLEKRSEPQPEEGSPAGGQKGGAPAE |
| | | GEGAAETLPEASRAVENGCCTPKEGRGAPAEAGKEQKE |
| | | TNIESMKMEGSRGRLRGGLGWESSLRQRPMPRLTFQAG |
| | | DPYYISKRKRDEWLARWKREAEKKAKVIAGMNAVEEN |
| | | QGPGESQKVEEASPPAVQQPTDPASPTVATTPEPVGSDA |
| | | GDKNATKAGDDEPEYEDGRGFGIGELVWGKLRGFSWW |
| | | PGRIVSWWMTGRSRAAEGTRWVMWFGDGKFSVVCVE |
| | | KLMPLSSFCSAFHQATYNKQPMYRKAIYEVLQVASSRA |
| | | GKLFPVCHDSDESDTAKAVEVQNKPMIEWALGGFQPSG |
| | | PKGLEPPEEEKNPYKEVYTDMWVEPEAAAYAPPPPAKK |
| | | PRKSTAEKPKVKEIIDERTRERLVYEVRQKCRNIEDICISC |
| | | GSLNVTLEHPLFVGGMCQNCKNCFLECAYQYDDDGYQ |
| | | SYCTICCGGREVLMCGNNNCCRCFCVECVDLLVGPGAA |
| | | QAAIKEDPWNCYMCGHKGTYGLLRRREDWPSRLQMFF |
| | | ANNHDQEFDPPKVYPPVPAEKRKPIRVLSLFDGIATGLLV |
| | | LKDLGIQVDRYIASEVCEDSITVGMVRHQGKIMYVGDV |
| | | RSVTQKHIQEWGPFDLVIGGSPCNDLSIVNPARKGLYEG |
| | | TGRLFFEFYRLLHDARPKEGDDRPFFWLFENVVAMGVS |
| | | DKRDISRFLESNPVMIDAKEVSAAHRARYFWGNLPGMN |
| | | RPLASTVNDKLELQECLEHGRIAKFSKVRTITTRSNSIKQ |
| | | GKDQHFPVFMNEKEDILWCTEMERVFGFPVHYTDVSNM |
| | | SRLARQRLLGRSWSVPVIRHLFAPLKEYFACV |
| 575 | human DNMT3A | NHDQEFDPPKVYPPVPAEKRKPIRVLSLFDGIATGLLVLK |
| | catalytic | DLGIQVDRYIASEVCEDSITVGMVRHQGKIMYVGDVRS |
| | domain | VTQKHIQEWGPFDLVIGGSPCNDLSIVNPARKGLYEGTG |
| | | RLFFEFYRLLHDARPKEGDDRPFFWLFENVVAMGVSDK |
| | | RDISRFLESNPVMIDAKEVSAAHRARYFWGNLPGMNRP |
| | | LASTVNDKLELQECLEHGRIAKFSKVRTITTRSNSIKQGK |
| | | DQHFPVFMNEKEDILWCTEMERVFGFPVHYTDVSNMSR |
| | | LARQRLLGRSWSVPVIRHLFAPLKEYFACV |
| 576 | human DNMT3B | MKGDTRHLNGEEDAGGREDSILVNGACSDQSSDSPPILE |
| | | AIRTPEIRGRRSSSRLSKREVSSLLSYTQDLTGDGDGEDG |
| | | DGSDTPVMPKLFRETRTRSESPAVRTRNNNSVSSRERHR |
| | | PSPRSTRGRQGRNHVDESPVEFPATRSLRRRATASAGTP |
| | | WPSPPSSYLTIDLTDDTEDTHGTPQSSSTPYARLAQDSQQ |
| | | GGMESPQVEADSGDGDSSEYQDGKEFGIGDLVWGKIKG |
| | | FSWWPAMVVSWKATSKRQAMSGMRWVQWFGDGKFS |
| | | EVSADKLVALGLFSQHFNLATFNKLVSYRKAMYHALEK |
| | | ARVRAGKTFPSSPGDSLEDQLKPMLEWAHGGFKPTGIEG |
| | | LKPNNTQPVVNKSKVRRAGSRKLESRKYENKTRRRTAD |
| | | DSATSDYCPAPKRLKTNCYNNGKDRGDEDQSREQMAS |
| | | DVANNKSSLEDGCLSCGRKNPVSFHPLFEGGLCQTCRDR |
| | | FLELFYMYDDDGYQSYCTVCCEGRELLLCSNTSCCRCFC |
| | | VECLEVLVGTGTAAEAKLQEPWSCYMCLPQRCHGVLRR |
| | | RKDWNVRLQAFFTSDTGLEYEAPKLYPAIPAARRRPIRV |
| | | LSLFDGIATGYLVLKELGIKVGKYVASEVCEESIAVGTV |
| | | KHEGNIKYVNDVRNITKKNIEEWGPFDLVIGGSPCNDLS |
| | | NVNPARKGLYEGTGRLFFEFYHLLNYSRPKEGDDRPFF |
| | | WMFENVVAMKVGDKRDISRFLECNPVMIDAIKVSAAHR |
| | | ARYFWGNLPGMNRPVIASKNDKLELQDCLEYNRIAKLK |
| | | KVQTITTKSNSIKQGKNQLFPVVMNGKEDVLWCTELERI |
| | | FGFPVHYTDVSNMGRGARQKLLGRSWSVPVIRHLFAPL |
| | | KDYFACE |
| 577 | mouse DNMT3C | MRGGSRHLSNEEDVSGCEDCIIISGTCSDQSSDPKTVPLT |
| | | QVLEAVCTVENRGCRTSSQPSKRKASSLISYVQDLTGDG |
| | | DEDRDGEVGGSSGSGTPVMPQLFCETRIPSKTPAPLSWQ |
| | | ANTSASTPWLSPASPYPIIDLTDEDVIPQSISTPSVDWSQD |
| | | SHQEGMDTTQVDAESRDGGNIEYQVSADKLLLSQSCILA |
| | | AFYKLVPYRESIYRTLEKARVRAGKACPSSPGESLEDQL |
| | | KPMLEWAHGGFKPTGIEGLKPNKKQPENKSRRRTTNDP |
| | | AASESSPPKRLKTNSYGGKDRGEDEESREQMASDVTNN |
| | | KGNLEDHCLSCGRKDPVSFHPLFEGGLCQSCRDRFLELF |
| | | YMYDEDGYQSYCTVCCEGRELLLCSNTSCCRCFCVECL |
| | | EVLVGAGTAEDVKLQEPWSCYMCLPQRCHGVLRRRKD |
| | | WNMRLQDFFTTDPDLEEFEPPKLYPAIPAAKRRPIRVLSL |
| | | FDGIATGYLVLKELGIKVEKYIASEVCAESIAVGTVKHEG |
| | | QIKYVDDIRNITKEHIDEWGPFDLVIGGSPCNDLSCVNPV |
| | | RKGLFEGTGRLFFEFYRLLNYSCPEEEDDRPFFWMFENV |
| | | VAMEVGDKRDISRFLECNPVMIDAIKVSAAHRARYFWG |
| | | NLPGMNRPVMASKNDKLELQDCLEFSRTAKLKKVQTIT |
| | | TKSNSIRQGKNQLFPVVMNGKDDVLWCTELERIFGFPEH |
| | | YTDVSNMGRGARQKLLGRSWSVPVIRHLFAPLKDHFAC |
| | | E |
| 578 | human DNMT3L | MAAIPALDPEAEPSMDVILVGSSELSSSVSPGTGRDLIAY |
| | | EVKANQRNIEDICICCGSLQVHTQHPLFEGGICAPCKDKF |
| | | LDALFLYDDDGYQSYCSICCSGETLLICGNPDCTRCYCFE |
| | | CVDSLVGPGTSGKVHAMSNWVCYLCLPSSRSGLLQRRR |
| | | KWRSQLKAFYDRESENPLEMFETVPVWRRQPVRVLSLF |
| | | EDIKKELTSLGFLESGSDPGQLKHVVDVTDTVRKDVEE |
| | | WGPFDLVYGATPPLGHTCDRPPSWYLFQFHRLLQYARP |
| | | KPGSPRPFFWMFVDNLVLNKEDLDVASRFLEMEPVTIPD |
| | | VHGGSLQNAVRVWSNIPAIRSSRHWALVSEEELSLLAQN |
| | | KQSSKLAAKWPTKLVKNCFLPLREYFKYFSTELTSSL |
| 579 | human DNMT3L | NPLEMFETVPVWRRQPVRVLSLFEDIKKELTSLGFLESGS |
| | catalytic | DPGQLKHVVDVTDTVRKDVEEWGPFDLVYGATPPLGH |
| | domain | TCDRPPSWYLFQFHRLLQYARPKPGSPRPFFWMFVDNL |
| | | VLNKEDLDVASRFLEMEPVTIPDVHGGSLQNAVRVWSN |
| | | IPAIRSRHWALVSEEELSLLAQNKQSSKLAAKWPTKLVK |
| | | NCFLPLREYFKYFSTELTSSL |
| 580 | mouse DNMT3L | MGSRETPSSCSKTLETLDLETSDSSSPDADSPLEEQWLKS |
| | | SPALKEDSVDVVLEDCKEPLSPSSPPTGREMIRYEVKVN |
| | | RRSIEDICLCCGTLQVYTRHPLFEGGLCAPCKDKFLESLF |
| | | LYDDDGHQSYCTICCSGGTLFICESPDCTRCYCFECVDIL |
| | | VGPGTSERINAMACWVCFLCLPFSRSGLLQRRKRWRHQ |
| | | LKAFHDQEGAGPMEIYKTVSAWKRQPVRVLSLFRNIDK |
| | | VLKSLGFLESGSGSGGGTLKYVEDVTNVVRRDVEKWGP |
| | | FDLVYGSTQPLGSSCDRCPGWYMFQFHRILQYALPRQES |
| | | QRPFFWIFMDNLLLTEDDQETTTRFLQTEAVTLQDVRGR |
| | | DYQNAMRVWSNIPGLKSKHAPLTPKEEEYLQAQVRSRS |
| | | KLDAPKVDLLVKNCLLPLREYFKYFSQNSLPL |
| 581 | mouse DNMT3L | GPMEIYKTVSAWKRQPVRVLSLFRNIDKVLKSLGFLESG |
| | catalytic | SGSGGGTLKYVEDVTNVVRRDVEKWGPFDLVYGSTQPL |
| | domain | GSSCDRCPGWYMFQFHRILQYALPRQESQRPFFWIFMDN |
| | | LLLTEDDQETTTRFLQTEAVTLQDVRGRDYQNAMRVWS |
| | | NIPGLKSKHAPLTPKEEEYLQAQVRSRSKLDAPKVDLLV |
| | | KNCLLPLREYFKYFSQNSLPL |
| 582 | Ailuropoda | MALSPTGTLSVETLDRSDPDPLDEGPWQATCEILLEPDA |
| | melanoleuca | EHSTDVILVGSSELSAPASPGPRRDLLAYEVKVNQRDIED |
| | DNMT3L | VCICCGSLRVHTQHPLFEGGMCAPCKDKFLDCLFLYDD |
| | | DGYQSYCSICCAGETLLICENPDCTRPSLMMKLRLFREC |
| | | ACLIFPSEGMLLQTVWFWKMTVVWQPGLRHLPQENPLE |
| | | TYKTVPVWKREPVRVLSLFGDIRRELMSLGFLESGSAPG |
| | | RLKHLDDVTDVVRKDVEGWGPFDLVYGSTPPIGHACDH |
| | | PPVWYLLQFHRILQYARPRPGSQQPFFWMFVDNLVLSQ |
| | | DDQTAATRFLEADPVTIQDVCGRAVRNTVHVWSNIPAV |
| | | RSRHSALALCEELSLLAQDRQRTKPPAQGPAQLVKNCFL |
| | | PLREYFKYFSTELTSSL |
| 583 | Ailuropoda | NPLETYKTVPVWKREPVRVLSLFGDIRRELMSLGFLESG |
| | melanoleuca | SAPGRLKHLDDVTDVVRKDVEGWGPFDLVYGSTPPIGH |
| | DNMT3L | ACDHPPVWYLLQFHRILQYARPRPGSQQPFFWMFVDNL |
| | catalytic | VLSQDDQTAATRFLEADPVTIQDVCGRAVRNTVHVWSN |
| | domain | IPAVRSRHSALALCEELSLLAQDRQRTKPPAQGPAQLVK |
| | | NCFLPLREYFKYFSTELTSSL |
| 584 | Carlito | MALSCRRTLPLESLHSSNSDLASQLDKEQWRPPCETHGI |
| | syrichta | PVAAAPVLDLEAECSLDVILVGSSELSTSSSPRLGRDHIA |
| | DNMT3L | YEVKVNQRNIEDICLCCGSFLVHTQHPLFEGGMCAPCKD |
| | | KFLDTLFLYDEDGYQSYCSICCSGETLLICENPDCTRCYC |
| | | FECLDTLVSPGTSEKVHAMSNWVCFLCLPFTRSGLLQRR |
| | | RKWRGQLKAFYDRESESSLEMYKTVPVWKREPVRVLSL |
| | | FGDIKKELMSLGFVETGSDPGRLRHLDDTTNIVRRNVEE |
| | | WGPFHLLYGATPPLGHTCDRPPGWYLFQFHRLLQYARP |
| | | QPGSPQPFFWMFVDNVMLTREDRAIASRFLETEPVTIPDI |
| | | HGRALQNAVCVWSNIPAVRSKHSALVSEEELSLLAQDR |
| | | QRAKLPTQGPTKLVKNCFLPLREYFKYFSTELTSFL |
| 585 | Carlito | SSLEMYKTVPVWKREPVRVLSLFGDIKKELMSLGFVETG |
| | syrichta | SDPGRLRHLDDTTNIVRRNVEEWGPFHLLYGATPPLGHT |
| | DNMT3L | CDRPPGWYLFQFHRLLQYARPQPGSPQPFFWMFVDNVM |
| | catalytic | LTREDRAIASRFLETEPVTIPDIHGRALQNAVCVWSNIPA |
| | domain | VRSKHSALVSEEELSLLAQDRQRAKLPTQGPTKLVKNCF |
| | | LPLREYFKYFSTELTSFL |
| 586 | Meriones | MGSQETPSTRAKTPGTWNLESTDSSSPESLGHLEEQWAN |
| | unguiculatus | SSPDLKDEHSKDVEPEDSKELISSASPPSGREIIRYEISVNQ |
| | DNMT3L | RNIEDICLCCGTLQVYKQHPLFEGGICAPCKDKFLETFFL |
| | | YDEDGHQSYCSICCSGGTLFICESPDCTRCYCFECVDILV |
| | | GPGTSERINAMPCWVCFLCLPFTRSGLLQRRRKWRHQL |
| | | KAFFDEGGASPLEMYKTVSAWKRKPMRVLSLFKNIDKE |
| | | LKNLGFLESGSGSEEERLKYLEDVTNVVRRDVEKWGPF |
| | | DLVYGSTRPRGSSCDHCPAWYMFQFHRILQYARPPSGSE |
| | | QPFFWVFVDNLLMTEDDQITADRFLQMKAVTLQDVRGR |
| | | VLQNAVRVWSNIPGVKSKHMALTEKEEQSLEAQAGTRT |
| | | KLSAQKVDPLVKNCLLPLREYFKFFSQNSLPLDK |
| 587 | Meriones | SPLEMYKTVSAWKRKPMRVLSLFKNIDKELKNLGFLES |
| | unguiculatus | GSGSEEERLKYLEDVTNVVRRDVEKWGPFDLVYGSTRP |
| | DNMT3L | RGSSCDHCPAWYMFQFHRILQYARPPSGSEQPFFWVFV |
| | catalytic | DNLLMTEDDQITADRFLQMKAVTLQDVRGRVLQNAVR |
| | domain | VWSNIPGVKSKHMALTEKEEQSLEAQAGTRTKLSAQKV |
| | | DPLVKNCLLPLREYFKFFSQNSLPLDK |
| 588 | Ochotona | MALPSPETLDSLDRVPASHPDEQHWTVCDNSDPILEVEA |
| | princeps | EGSMDVILVDDSPAPSGRDRIELEVKVNQRSIEDLCLCCG |
| | DNMT3L | SSQVHRQHPLFQGGLCAPCKDKFLEALFLYDEDGYQSY |
| | | CSICGLGDTLLVCESPDCTRGYCFACVDGLVGAGSSGH |
| | | MHTVSPWVCFLCVPGSRHGLLQRRRRWRTQLKVFHEQE |
| | | AAQPLEIYETVPACRRKPLRVLSLFEHIEKELASLGFLET |
| | | GSSPGRIRHLDDVTDVVRRDVEQWGPFDLVYGSTPPLG |
| | | HASPRSPGWYLFQFHRMLQYTQPTASTQRPFFWMFVDN |
| | | LLLTRDDLVTATRFLEVEPATLQDVRGRVLQGAMRVWS |
| | | NIPAVNSRHTELAPEAETALLAQSCRRAKASGEGLARLL |
| | | KSCFLPLREYFKYFPQSPLPLRK |
| 589 | Ochotona | QPLEIYETVPACRRKPLRVLSLFEHIEKELASLGFLETGSS |
| | princeps | PGRIRHLDDVTDVVRRDVEQWGPFDLVYGSTPPLGHAS |
| | DNMT3L | PRSPGWYLFQFHRMLQYTQPTASTQRPFFWMFVDNLLL |
| | catalytic | TRDDLVTATRFLEVEPATLQDVRGRVLQGAMRVWSNIP |
| | domain | AVNSRHTELAPEAETALLAQSCRRAKASGEGLARLLKSC |
| | | FLPLREYFKYFPQSPLPLRK |
| 590 | Neosciurus | MGGPRPAAVEESPHEIYKTVPAWKREPMRVLSLFGDIGK |
| | carolinensis | ELTSLGFLETGSEAGRLKHLEDVTDTVRRDVEEWGPFDL |
| | DNMT3L | VYGSTPALGHSCDRSPGWYLFQFHRLLQYARPRLGSPKP |
| | | FFWMFVDNLLLTKDDQAIASRFLEMEPVTLQDVHGRVL |
| | | QNAVRVWTNVPAVKSRHSALASEEELLLVQDGQRGRLP |
| | | AQGPAALVKHCFLPLREYFKYFSQNTLPLYK |
| 591 | Neosciurus | SPHEIYKTVPAWKREPMRVLSLFGDIGKELTSLGFLETGS |
| | carolinensis | EAGRLKHLEDVTDTVRRDVEEWGPFDLVYGSTPALGHS |
| | DNMT3L | CDRSPGWYLFQFHRLLQYARPRLGSPKPFFWMFVDNLL |
| | catalytic | LTKDDQAIASRFLEMEPVTLQDVHGRVLQNAVRVWTN |
| | domain | VPAVKSRHSALASEEELLLVQDGQRGRLPAQGPAALVK |
| | | HCFLPLREYFKYFSQNTLPLYK |
| 592 | Bison bison | MARSSPGTLNLEIMDGSDPDPALPPDREQWPPPCEILLDP |
| | DNMT3L | EPEHSLDIILVGSSELSSPPSPGPRRDFIAYEVKVNQRDIE |
| | | DVCICCGSLQLHTQHPLFEGGMCAPCKDKFLECLFLYDD |
| | | DGYQSYCSICCAGETLLICENPDCTRCYCFECVDTLVGP |
| | | GTSGKVHAMSNWVCFLCLPFPRSGLLQRRRKWRTWLK |
| | | AFYDREAESPLVMYKTVPVWKREPIRVLSLFGDIKKELT |
| | | SLGFLEDGSKPGRLKHLDDVTNIVRRDIDEWGPFDLTYG |
| | | STPTLGHTCDHPPGWYVYQFHRILQYARPLPGSPQPFFW |
| | | MFVDNLVLTEEDLDVATRFLETDPVTIQDVRGRTVQNA |
| | | VHVWSNIPAVKSRHSALVSQEELSLLAQDRQRVKSPVQ |
| | | GPATLVKNCFLPLREYFKYFSTELTSSL |
| 593 | Bison bison | SPLVMYKTVPVWKREPIRVLSLFGDIKKELTSLGFLEDGS |
| | DNMT3L | KPGRLKHLDDVTNIVRRDIDEWGPFDLTYGSTPTLGHTC |
| | catalytic | DHPPGWYVYQFHRILQYARPLPGSPQPFFWMFVDNLVL |
| | domain | TEEDLDVATRFLETDPVTIQDVRGRTVQNAVHVWSNIPA |
| | | VKSRHSALVSQEELSLLAQDRQRVKSPVQGPATLVKNC |
| | | FLPLREYFKYFSTELTSSL |
| 594 | Equus | MALSSPGTLSLETLDSWDPDVAGQLDEERWQPSSEIVGR |
| | przewalskii | PMAAAPVLDLEEEPSMDIILVDSSELSSPPSPGPSRDMCIC |
| | DNMT3L | CGSFQVHTQHPLFEGGMCAACKDKFLSCLFLYDDDGNQ |
| | | SYCSICCSGETLLICENPDCTRCYCFECVDTLVSPRTSEK |
| | | VQAMSNWVCFLCLPFPRSGLLQRRRKWRGWLKAFYDQ |
| | | EAVRSRSAWGRRMRSGPHLVGFLWLLVAKCPSALESPL |
| | | EMYKTVPVWKREPVRVLSLFGDIKKELTTLGFLENGSDP |
| | | GRLKHLDDVTNTVRRDVEEWGPFDLVYGSTPPLGHACD |
| | | HPPGWYLFQFHRVLQYARPRPGSPQAFFWMFVDNLVLT |
| | | EDDRAVATRFLETDPVTIQDVCGRAVRNAVHVWSNIPA |
| | | VKSRHSALFSQEESFLRAQDRQRAKPPARGPAKLVKNCF |
| | | LPLREYFKYFSTEFTSSL |
| 595 | Equus | SPLEMYKTVPVWKREPVRVLSLFGDIKKELTTLGFLENG |
| | przewalskii | SDPGRLKHLDDVTNTVRRDVEEWGPFDLVYGSTPPLGH |
| | DNMT3L | ACDHPPGWYLFQFHRVLQYARPRPGSPQAFFWMFVDNL |
| | catalytic | VLTEDDRAVATRFLETDPVTIQDVCGRAVRNAVHVWSN |
| | domain | IPAVKSRHSALFSQEESFLRAQDRQRAKPPARGPAKLVK |
| | | NCFLPLREYFKYFSTEFTSSL |
| 596 | Mus caroli | MGSRETPSSFSKTLETLDLETSDSSSPDADSPLEEQWLKS |
| | DNMT3L | SPALKEDNVDMVLEDCKEPLSPSSPPTGREMIRYEVKVN |
| | | RRSIEDICLCCGTLQVYTQHPLFEGGICAPCKDKFLESLFL |
| | | YDDDGHQSYCTICCSGGTLFICESPDCTRCYCFECVDILV |
| | | GPGTSERINAMACWVCFLCLPFSRSGLLQRRKRWRHQL |
| | | KAFHDQEGAGPMEIYKTVSTWKRQPVRVLSLFGNIDKV |
| | | LKSLGFLESGSGSGGGTLKYVEDVTNVVRRDVEKWGPF |
| | | DLVYGSTQPLGSSCDRCPGWYMFQFHRILQYALPRQES |
| | | QRPFFWIFMDNLLMTEDDQETTARFLQTEAVTLQDVRG |
| | | RDYQNVMRVWSNIPGLKSKHVPLTPKEEEYLQAQVRTR |
| | | SKLDAQKVDLLVKNCLLPLREYFKYFS |
| 597 | Mus caroli | GPMEIYKTVSTWKRQPVRVLSLFGNIDKVLKSLGFLESG |
| | DNMT3L | SGSGGGTLKYVEDVTNVVRRDVEKWGPFDLVYGSTQPL |
| | catalytic | GSSCDRCPGWYMFQFHRILQYALPRQESQRPFFWIFMDN |
| | domain | LLMTEDDQETTARFLQTEAVTLQDVRGRDYQNVMRVW |
| | | SNIPGLKSKHVPLTPKEEEYLQAQVRTRSKLDAQKVDLL |
| | | VKNCLLPLREYFKYFS |
| 598 | Pan | MAAIPALDPEAEPSMDVILVGSSELSSSISPRTGRDLIAYE |
| | troglodytes | VKANQRNIEDICICCGSLQVHTQHPLFEGGICAPCKDKSL |
| | DNMT3L | DALFLYDDDGYQSYCSICCSGETLLICGNPDCTRCYCFE |
| | | CVDSLVGPGTSGKVHAMSNWVCYLCLPSSRSGLLQRRR |
| | | KWRSQLKAFYDRESENPLEMFETVPVWRRQPVRVLSLF |
| | | EDIKKELTSLGFLESGSDPGQLKHVVDVTDTVRKDVEE |
| | | WGPFDLVYGATPPLGHTCDRPPSWYLFQFHRLLQYARP |
| | | KPGSPRPFFWMFVDNLVLNKEDLDVASRFLEMEPVTIPD |
| | | VHGGSLQNAVRVWSNIPAIRSSRHWALVSEEELSLLAQN |
| | | KQSSKLAAKWPTKLVKNCFLPLREYFKYFSTELTSSL |
| 599 | Pan | NPLEMFETVPVWRRQPVRVLSLFEDIKKELTSLGFLESGS |
| | troglodytes | DPGQLKHVVDVTDTVRKDVEEWGPFDLVYGATPPLGH |
| | DNMT3L | TCDRPPSWYLFQFHRLLQYARPKPGSPRPFFWMFVDNL |
| | catalytic | VLNKEDLDVASRFLEMEPVTIPDVHGGSLQNAVRVWSN |
| | domain | IPAIRSSRHWALVSEEELSLLAQNKQSSKLAAKWPTKLV |
| | | KNCFLPLREYFKYFSTELTSSL |
| 600 | human TRDMT1 | MEPLRVLELYSGVGGMHHALRESCIPAQVVAAIDVNTV |
| | (DNMT2) | ANEVYKYNFPHTQLLAKTIEGITLEEFDRLSFDMILMSPP |
| | | CQPFTRIGRQGDMTDSRTNSFLHILDILPRLQKLPKYILLE |
| | | NVKGFEVSSTRDLLIQTIENCGFQYQEFLLSPTSLGIPNSR |
| | | LRYFLIAKLQSEPLPFQAPGQVLMEFPKIESVHPQKYAM |
| | | DVENKIQEKNVEPNISFDGSIQCSGKDAILFKLETAEEIHR |
| | | KNQQDSDLSVKMLKDFLEDDTDVNQYLLPPKSLLRYAL |
| | | LLDIVQPTCRRSVCFTKGYGSYIEGTGSVLQTAEDVQVE |
| | | NIYKSLTNLSQEEQITKLLILKLRYFTPKEIANLLGFPPEFG |
| | | FPEKITVKQRYRLLGNSLNVHVVAKLIKILYE |
| 601 | M. bacterium | MAEWYIPAIVSYQAIHNGFTLNKINHKIELQTMIDYLESK |
| | methyl- | TLSMNSKEPVKRGFWYKKHLDEIRIVYTAVKMSEQEGNI |
| | transferase | FDVRTLFERGLSDIDLLTYSFPCQDLSQQGKQKGMGRDS |
| | | QTRSGLLWEIEKALDTSKKEDLPKYLLMENVVALTHKV |
| | | NAEELDEWMMKLESLGYKNDLRILNAGDFGSSQARRRT |
| | | FMISTLNEKVELPVGNKKPKSMNKILNDEPTRKDFLPAL |
| | | DKFDLTEYKWTKSNINKAKLINYSTFNSEAYVYDSNFTG |
| | | PTLTASGANSRIKFEYNGKIRKIGAEEAYAYMGFKKSDYI |
| | | KVNKLNYLNETKMIYTCGNSISVEVLRSIMTNINNNFKE |
| | | NK |
| 602 | M. marinum | MLFLIGTFKYVLIYITKVIRIFEAFAGIGAQRKALRNIKSN |
| | methyl- | YEVSGMAEWYIPAIVSYQAIHNGFTLSRVDKKTKLTEMI |
| | transferase | KYLESKTLSMDSKEPVRTGYWFKKHKDMVRIVYSAVKL |
| | | SEAEGNIFDVRTLHERKLEDIDLLTYSFPCQDLSQQGKQR |
| | | GMKKDSGTRSGLLWEIEKALEATPKDKLPKYLLMENVV |
| | | ALTHKTNKKDLDNWKRKLRSLGYYNDINVLNAGDFGSS |
| | | QARRRAFMISTLDSKVTLPLGDKKPQAISKILNKETRSQD |
| | | FMPALDEYEKTDFKRTLSNIKKCKLIDYTSFNSEAYVYD |
| | | PKYTGPTLTASGANSRIKFTHQGKMRKINAEEAYRYMG |
| | | FSTNDYKKVNNLNFLSETKMIYTCGNSISVEVLEEIMLKII |
| | | REDNNG |
| 603 | S. chinense | MKKIRLFEAFAGIGSQRRALKSVVGNNFEIAGLAEWYVP |
| | methyl- | AIVMYQIINNDFSKKNVLDNVPRDEVIDYLNSKCLSWDS |
| | transferase | KKPVSKNFWNRKSQDILNVIYSAVKKSEEEGNIFDVRTL |
| | | HERTLESIDILTYSFPCQDLSQQGIQKGMKKNSGTRSGLL |
| | | WEIEKAIDNTPKNNLPKILLMENVPALLNKTNELELKEW |
| | | LIKLENMGYKNSIGILNAADFGSPQARRRVFMISSRNKKI |
| | | ELPVGKSKPGKLNDILEKNVEDKFIMTNLEKYDFSEFSLT |
| | | KSNIKKCSLINYTKFNSEAYVYDPDFTGPTLTASGANSRI |
| | | KIYDKGFIRRMSPLESFRYMGFDDEDYKKIDEFEFLTDTQ |
| | | KIFVCGNSISIEVLKAIFERIDSNE |
| 604 | M. penetrans | MNSNKDKIKVIKVFEAFAGIGSQFKALKNIARSKNWEIQ |
| | M MpeI | HSGMVEWFVDAIVSYVAIHSKNFNPKIEQLDKDILSISND |
| | | SKMPISEYGIKKINNTIKASYLNYAKKHENNLFDIKKVNK |
| | | DNFPKNIDIFTYSFPCQDLSVQGLQKGIDKELNTRSGLLW |
| | | EIERILEEIKNSFSKEEMPKYLLMENVKNLLSHKNKKNY |
| | | NTWLKQLEKFGYKSKTYLLNSKNFDNCQNRERVFCLSIR |
| | | DDYLEKTGFKFKELEKVKNPPKKIKDILVDSSNYKYLNL |
| | | NKYETTTFRETKSNIISRSLKNYTTFNSENYVYNINGIGPT |
| | | LTASGANSRIKIETQQGVRYLTPLECFKYMQFDVNDFKK |
| | | VQSTNLISENKMIYIAGNSIPVKILEAIFNTLEFVNNEE |
| 605 | S. monobiae | MSKVENKTKKLRVFEAFAGIGAQRKALEKVRKDEYEIV |
| | M SssI | GLAEWYVPAIVMYQAIHNNFHTKLEYKSVSREEMIDYL |
| | | ENKTLSWNSKNPVSNGYWKRKKDDELKIIYNAIKLSEKE |
| | | GNIFDIRDLYKRTLKNIDLLTYSFPCQDLSQQGIQKGMKR |
| | | GSGTRSGLLWEIERALDSTEKNDLPKYLLMENVGALLH |
| | | KKNEEELNQWKQKLESLGYQNSIEVLNAADFGSSQARR |
| | | RVFMISTLNEFVELPKGDKKPKSIKKVLNKIVSEKDILNN |
| | | LLKYNLTEFKKTKSNINKASLIGYSKFNSEGYVYDPEFTG |
| | | PTLTASGANSRIKIKDGSNIRKMNSDETFLYIGFDSQDGK |
| | | RVNEIEFLTENQKIFVCGNSISVEVLEAIIDKIGG |
| 606 | H. | MKDVLDDNLLEEPAAQYSLFEPESNPNLREKFTFIDLFA |
| | parainfluenzae | GIGGFRIAMQNLGGKCIFSSEWDEQAQKTYEANFGDLPY |
| | M HpaII | GDITLEETKAFIPEKFDILCAGFPCQAFSIAGKRGGFEDTR |
| | | GTLFFDVAEIIRRHQPKAFFLENVKGLKNHDKGRTLKTIL |
| | | NVLREDLGYFVPEPAIVNAKNFGVPQNRERIYIVGFHKST |
| | | GVNSFSYPEPLDKIVTFADIREEKTVPTKYYLSTQYIDTL |
| | | RKHKERHESKGNGFGYEIIPDDGIANAIVVGGMGRERNL |
| | | VIDHRITDFTPTTNIKGEVNREGIRKMTPREWARLQGFPD |
| | | SYVIPVSDASAYKQFGNSVAVPAIQATGKKILEKLGNLY |
| | | D |
| 607 | A. luteus M | MSKANAKYSFVDLFAGIGGFHAALAATGGVCEYAVEID |
| | AluI | REAAAVYERNWNKPALGDITDDANDEGVTLRGYDGPID |
| | | VLTGGFPCQPFSKSGAQHGMAETRGTLFWNIARIIEEREP |
| | | TVLILENVRNLVGPRHRHEWLTIIETLRFFGYEVSGAPAIF |
| | | SPHLLPAWMGGTPQVRERVFITATLVPERMRDERIPRTE |
| | | TGEIDAEAIGPKPVATMNDRFPIKKGGTELFHPGDRKSG |
| | | WNLLTSGIIREGDPEPSNVDLRLTETETLWIDAWDDLEST |
| | | IRRATGRPLEGFPYWADSWTDFRELSRLVVIRGFQAPER |
| | | EVVGDRKRYVARTDMPEGFVPASVTRPAIDETLPAWKQ |
| | | SHLRRNYDFFERHFAEVVAWAYRWGVYTDLFPASRRKL |
| | | EWQAQDAPRLWDTVMHFRPSGIRAKRPTYLPALVAITQ |
| | | TSIVGPLERRLSPRETARLQGLPEWFDFGEQRAAATYKQ |
| | | MGNGVNVGVVRHILREHVRRDRALLKLTPAGQRIINAV |
| | | LADEPDATVGALGAAE |
| 608 | H. aegyptius | MNLISLFSGAGGLDLGFQKAGFRIICANEYDKSIWKTYES |
| | M HaeIII | NHSAKLIKGDISKISSDEFPKCDGIIGGPPCQSWSEGGSLR |
| | | GIDDPRGKLFYEYIRILKQKKPIFFLAENVKGMMAQRHN |
| | | KAVQEFIQEFDNAGYDVHIILLNANDYGVAQDRKRVFYI |
| | | GFRKELNINYLPPIPHLIKPTFKDVIWDLKDNPIPALDKNK |
| | | TNGNKCIYPNHEYFIGSYSTIFMSRNRVRQWNEPAFTVQ |
| | | ASGRQCQLHPQAPVMLKVSKNLNKFVEGKEHLYRRLTV |
| | | RECARVQGFPDDFIFHYESLNDGYKMIGNAVPVNLAYEI |
| | | AKTIKSALEICKGN |
| 609 | H. | MIEIKDKQLTGLRFIDLFAGLGGFRLALESCGAECVYSNE |
| | haemolyticus | WDKYAQEVYEMNFGEKPEGDITQVNEKTIPDHDILCAG |
| | M HhaI | FPCQAFSISGKQKGFEDSRGTLFFDIARIVREKKPKVVFM |
| | | ENVKNFASHDNGNTLEVVKNTMNELDYSFHAKVLNAL |
| | | DYGIPQKRERIYMICFRNDLNIQNFQFPKPFELNTFVKDL |
| | | LLPDSEVEHLVIDRKDLVMTNQEIEQTTPKTVRLGIVGK |
| | | GGQGERIYSTRGIAITLSAYGGGIFAKTGGYLVNGKTRK |
| | | LHPRECARVMGYPDSYKVHPSTSQAYKQFGNSVVINVL |
| | | QYIAYNIGSSLNFKPY |
| 610 | Moraxella | MKPEILKLIRSKLDLTQKQASEIIEVSDKTWQQWESGKTE |
| | M MspI | MHPAYYSFLQEKLKDKINFEELSAQKTLQKKIFDKYNQN |
| | | QITKNAEELAEITHIEERKDAYSSDFKFIDLESGIGGIRQSF |
| | | EVNGGKCVFSSEIDPFAKFTYYTNFGVVPFGDITKVEATT |
| | | IPQHDILCAGFPCQPFSHIGKREGFEHPTQGTMFHEIVRIIE |
| | | TKKTPVLFLENVPGLINHDDGNTLKVIIETLEDMGYKVH |
| | | HTVLDASHFGIPQKRKRFYLVAFLNQNIHFEFPKPPMISK |
| | | DIGEVLESDVTGYSISEHLQKSYLFKKDDGKPSLIDKNTT |
| | | GAVKTLVSTYHKIQRLTGTFVKDGETGIRLLTTNECKAI |
| | | MGFPKDFVIPVSRTQMYRQMGNSVVVPVVTKIAEQISLA |
| | | LKTVNQQSPQENFELELV |
| 611 | Ascobolus | MSERRYEAGMTVALHEGSFLKIQRVYIRQYHADNRREH |
| | Masc1 | MLVGPLFRRTKYLKALSKKVNEVAIVHESIHVPVQDVIG |
| | | VRELIITNRPFPECRKGDEHTGRLVCRWVYNLDERAKGR |
| | | EYKKQRYIRRITEAEADPEYRVEDRVLRRRWFQEGYIGD |
| | | EISYKEHGNGDIVDIRSESPLQVLDGWGGDLVDLENGEE |
| | | TSIPGPCRSASSYGRLMKPPLAQAADSNTSRKYTFGDTF |
| | | CGGGGVSLGARQAGLEVKWAFDMNPNAGANYRRNFPN |
| | | TDFFLAEAEQFIQLSVGISQHVDILHLSPPCQTFSRAHTIA |
| | | GKNDENNEASFFAVVNLIKAVRPRLFTVEETDGIMDRQS |
| | | RQFIDTALMGITELGYSFRICVLNAIEYGVCQNRKRLIIIG |
| | | AAPGEELPPFPLPTHQDFFSKDPRRDLLPAVTLDDALSTI |
| | | TPESTDHHLNHVWQPAEWKTPYDAHRPFKNAIRAGGGE |
| | | YDIYPDGRRKFTVRELACIQGFPDEYEFVGTLTDKRRIIG |
| | | NAVPPPLSAAIMSTLRQWMTEKDFERME |
| 612 | Arabidopsis | MVENGAKAAKRKKRPLPEIQEVEDVPRTRRPRRAAACT |
| | MET1 | SFKEKSIRVCEKSATIEVKKQQIVEEEFLALRLTALETDV |
| | | EDRPTRRLNDFVLFDSDGVPQPLEMLEIHDIFVSGAILPS |
| | | DVCTDKEKEKGVRCTSFGRVEHWSISGYEDGSPVIWIST |
| | | ELADYDCRKPAASYRKVYDYFYEKARASVAVYKKLSK |
| | | SSGGDPDIGLEELLAAVVRSMSSGSKYFSSGAAIIDFVISQ |
| | | GDFIYNQLAGLDETAKKHESSYVEIPVLVALREKSSKIDK |
| | | PLQRERNPSNGVRIKEVSQVAESEALTSDQLVDGTDDDR |
| | | RYAILLQDEENRKSMQQPRKNSSSGSASNMFYIKINEDEI |
| | | ANDYPLPSYYKTSEEETDELILYDASYEVQSEHLPHRML |
| | | HNWALYNSDLRFISLELLPMKQCDDIDVNIFGSGVVTDD |
| | | NGSWISLNDPDSGSQSHDPDGMCIFLSQIKEWMIEFGSD |
| | | DIISISIRTDVAWYRLGKPSKLYAPWWKPVLKTARVGISI |
| | | LTFLRVESRVARLSFADVTKRLSGLQANDKAYISSDPLA |
| | | VERYLVVHGQIILQLFAVYPDDNVKRCPFVVGLASKLED |
| | | RHHTKWIIKKKKISLKELNLNPRAGMAPVASKRKAMQA |
| | | TTTRLVNRIWGEFYSNYSPEDPLQATAAENGEDEVEEEG |
| | | GNGEEEVEEEGENGLTEDTVPEPVEVQKPHTPKKIRGSS |
| | | GKREIKWDGESLGKTSAGEPLYQQALVGGEMVAVGGA |
| | | VTLEVDDPDEMPAIYFVEYMFESTDHCKMLHGRFLQRG |
| | | SMTVLGNAANERELFLTNECMTTQLKDIKGVASFEIRSR |
| | | PWGHQYRKKNITADKLDWARALERKVKDLPTEYYCKS |
| | | LYSPERGGFFSLPLSDIGRSSGFCTSCKIREDEEKRSTIKL |
| | | NVSKTGFFINGIEYSVEDFVYVNPDSIGGLKEGSKTSFKS |
| | | GRNIGLRAYVVCQLLEIVPKESRKADLGSFDVKVRRFYR |
| | | PEDVSAEKAYASDIQELYFSQDTVVLPPGALEGKCEVRK |
| | | KSDMPLSREYPISDHIFFCDLFFDTSKGSLKQLPANMKPK |
| | | FSTIKDDTLLRKKKGKGVESEIESEIVKPVEPPKEIRLATL |
| | | DIFAGCGGLSHGLKKAGVSDAKWAIEYEEPAGQAFKQN |
| | | HPESTVFVDNCNVILRAIMEKGGDQDDCVSTTEANELAA |
| | | KLTEEQKSTLPLPGQVDFINGGPPCQGFSGMNRFNQSSW |
| | | SKVQCEMILAFLSFADYFRPRYFLLENVRTFVSFNKGQT |
| | | FQLTLASLLEMGYQVRFGILEAGAYGVSQSRKRAFIWAA |
| | | APEEVLPEWPEPMHVFGVPKLKISLSQGLHYAAVRSTAL |
| | | GAPFRPITVRDTIGDLPSVENGDSRTNKEYKEVAVSWFQ |
| | | KEIRGNTIALTDHICKAMNELNLIRCKLIPTRPGADWHDL |
| | | PKRKVTLSDGRVEEMIPFCLPNTAERHNGWKGLYGRLD |
| | | WQGNFPTSVTDPQPMGKVGMCFHPEQHRILTVRECARS |
| | | QGFPDSYEFAGNINHKHRQIGNAVPPPLAFALGRKLKEA |
| | | LHLKKSPQHQP |
| 613 | Ascobolus | MELTPELSGVSTDLGGGGSIFAHWRMKEESPAPTEILDD |
| | Masc2 | LNVLEWEKTTRDYSKEDLRIADQLFSIEDEHQSLPFETAD |
| | | AEDGTPTEEEEEKELPMRTLDNFVLYDASDLELAALDLI |
| | | GTELNIHAVGTVGPIYTEGEEDEQEDEDEDVSPPVRTGT |
| | | QATSASVTQMTVELYIRNIVQYEFCFNDDGTVETWIQTT |
| | | NAHYKLLQPAKCYTSLYRPVNDCLNVITAIITLAPESTTM |
| | | SLKDLLKVMDDKAQAVSYEEVERMSEFIVQHLDQWME |
| | | TAPKKKSKLIEKSKVYIDLNNLAGIDMVSGVRPPPVRRV |
| | | TGRSSAPKKRIVRNMNDAVLLHQNETTVTNWIHQLSAG |
| | | MFGRALNVLGAETADVENLTCDPASAKFVVPQRRLHKR |
| | | LKWETRGHIPVSEEEYKHIYQGKKYAKFFEAVRAVDES |
| | | KLTIKLGDLVYVLDQDPKVTQTQFATAGREGRKKGAEK |
| | | EKIQVRFGRVLSIRQPDSNSKDAQNVFIHVQWLVLGCDT |
| | | ILQEMASRRELFLTDSCDTVFADVIYGVAKLTPLGAKDIP |
| | | TVEFHESMATMMGENEFFVRFKYNYQDGSFTDLKDVD |
| | | AEQIGTLQPRVNTHRNPGYCSNCRIKYDNERTGDKWIYE |
| | | NDTEGEPRLFRSSKGWCIYAQEFVYLQPVEKQPGTTFRV |
| | | GYISEINKSSVIVELLARVDDDDKSGHISYSDPRHLYFTG |
| | | TDIKVTFDKIIRKCFVFHDSGDQKAKAPLMYGTLQRDLY |
| | | YYRYEKRKGKAELVPVREIRSIHEQTLNDWESRTQIERH |
| | | GAVSGKKLKGLDIFAGCGGLTLGLDLSGAVDTKWDIEF |
| | | APSAANTLALNFPDAQVFNQCANVLLSRAIQSEDEGSLD |
| | | IEYDLQGRVLPDLPKKGEVDFIYGGPPCQGFSGVNRYKK |
| | | GNDIKNSLVATFLSYVDHYKPRFVLLENVKGLITTKLGN |
| | | SKNAEGKWEGGISNGVVKFIYRTLISMNYQCRIGLVQSG |
| | | EYGVPQSRPRVIFLAARMGERLPDLPEPMHAFEVLDSQY |
| | | ALPHIKRYHTTQNGVAPLPRITIGEAVSDLPKFQYANPGV |
| | | WPRHDPYSSAKAQPSDKTIEKFSVSKATSFVGYLLQPYH |
| | | SRPQSEFQRRLRTKLVPSDEPAEKTSLLTTKLVTAHVTRL |
| | | FNKETTQRIVCVPMWPGADHRSLPKEMRPWCLVDPNSQ |
| | | AEKHRFWPGLFGRLGMEDFFSTALTDVQPCGKQGKVLH |
| | | PTQRRVYTVRELARAQGFPDWFAFTDGDADSGLGGVK |
| | | KWHRNIGNAVPVPLGEQIGRCIGYSVWWKDDMIAQLRE |
| | | DGADEDEEMIDGNDQWVEELNTQMAADMPGLPLLVTH |
| | | LLNLCVYRRLYGPNAKEFLPARVYDKKLEGGRRRLVW |
| | | AML |
| 614 | Neurospora | MDSPDRSHGGMFIDVPAETMGFQEDYLDMFASVLSQGL |
| | Dim2 | AKEGDYAHHQPLPAGKEECLEPIAVATTITPSPDDPQLQL |
| | | QLELEQQFQTESGLNGVDPAPAPESEDEADLPDGFSDESP |
| | | DDDFVVQRSKHITVDLPVSTLINPRSTFQRIDENDNLVPP |
| | | PQSTPERVAVEDLLKAAKAAGKNKEDYIEFELHDFNFYV |
| | | NYAYHPQEMRPIQLVATKVLHDKYYFDGVLKYGNTKH |
| | | YVTGMQVLELPVGNYGASLHSVKGQIWVRSKHNAKKEI |
| | | YYLLKKPAFEYQRYYQPFLWIADLGKHVVDYCTRMVE |
| | | RKREVTLGCFKSDFIQWASKAHGKSKAFQNWRAQHPSD |
| | | DFRTSVAANIGYIWKEINGVAGAKRAAGDQLFRELMIV |
| | | KPGQYFRQEVPPGPVVTEGDRTVAATIVTPYIKECFGHM |
| | | ILGKVLRLAGEDAEKEKEVKLAKRLKIENKNATKADTK |
| | | DDMKNDTATESLPTPLRSLPVQVLEATPIESDIVSIVSSDL |
| | | PPSENNPPPLTNGSVKPKAKANPKPKPSTQPLHAAHVKY |
| | | LSQELVNKIKVGDVISTPRDDSSNTDTKWKPTDTDDHR |
| | | WFGLVQRVHTAKTKSSGRGLNSKSFDVIWFYRPEDTPC |
| | | CAMKYKWRNELFLSNHCTCQEGHHARVKGNEVLAVHP |
| | | VDWFGTPESNKGEFFVRQLYESEQRRWITLQKDHLTCY |
| | | HNQPPKPPTAPYKPGDTVLATLSPSDKFSDPYEVVEYFT |
| | | QGEKETAFVRLRKLLRRRKVDRQDAPANELVYTEDLVD |
| | | VRAERIVGKCIMRCFRPDERVPSPYDRGGTGNMFFITHR |
| | | QDHGRCVPLDTLPPTLRQGFNPLGNLGKPKLRGMDLYC |
| | | GGGNFGRGLEEGGVVEMRWANDIWDKAIHTYMANTPD |
| | | PNKTNPFLGSVDDLLRLALEGKFSDNVPRPGEVDFIAAG |
| | | SPCPGFSLLTQDKKVLNQVKNQSLVASFASFVDFYRPKY |
| | | GVLENVSGIVQTFVNRKQDVLSQLFCALVGMGYQAQLI |
| | | LGDAWAHGAPQSRERVFLYFAAPGLPLPDPPLPSHSHYR |
| | | VKNRNIGFLCNGESYVQRSFIPTAFKFVSAGEGTADLPKI |
| | | GDGKPDACVRFPDHRLASGITPYIRAQYACIPTHPYGMN |
| | | FIKAWNNGNGVMSKSDRDLFPSEGKTRTSDASVGWKRL |
| | | NPKTLFPTVTTTSNPSDARMGPGLHWDEDRPYTVQEMR |
| | | RAQGYLDEEVLVGRTTDQWKLVGNSVSRHMALAIGLK |
| | | FREAWLGTLYDESAVVATATATATTAAAVGVTVPVME |
| | | EPGIGTTESSRPSRSPVHTAVDLDDSKSERSRSTTPATVLS |
| | | TSSAAGDGSANAAGLEDDDNDDMEMMEVTRKRSSPAV |
| | | DEEGMRPSKVQKVEVTVASPASRRSSRQASRNPTASPSS |
| | | KASKATTHEAPAPEELESDAESYSETYDKEGFDGDYHSG |
| | | HEDQYSEEDEEEEYAEPETMTVNGMTIVKL |
| 615 | Drosophila | MVFRVLELFSGIGGMHYAFNYAQLDGQIVAALDVNTVA |
| | dDnmt2 | NAVYAHNYGSNLVKTRNIQSLSVKEVTKLQANMLLMSP |
| | | PCQPHTRQGLQRDTEDKRSDALTHLCGLIPECQELEYIL |
| | | MENVKGFESSQARNQFIESLERSGFHWREFILTPTQFNVP |
| | | NTRYRYYCIARKGADFPFAGGKIWEEMPGAIAQNQGLS |
| | | QIAEIVEENVSPDFLVPDDVLTKRVLVMDIIHPAQSRSMC |
| | | FTKGYTHYTEGTGSAYTPLSEDESHRIFELVKEIDTSNQD |
| | | ASKSEKILQQRLDLLHQVRLRYFTPREVARLMSFPENFEF |
| | | PPETTNRQKYRLLGNSINVKVVGELIKLLTIK |
| 616 | S. pombe | MLSTKRLRVLELYSGIGGMHYALNLANIPADIVCAIDINP |
| | Pmt1 | QANEIYNLNHGKLAKHMDISTLTAKDFDAFDCKLWTMS |
| | | PSCQPFTRIGNRKDILDPRSQAFLNILNVLPHVNNLPEYIL |
| | | IENVQGFEESKAAEECRKVLRNCGYNLIEGILSPNQFNIP |
| | | NSRSRWYGLARLNFKGEWSIDDVFQFSEVAQKEGEVKR |
| | | IRDYLEIERDWSSYMVLESVLNKWGHQFDIVKPDSSSCC |
| | | CFTRGYTHLVQGAGSILQMSDHENTHEQFERNRMALQL |
| | | RYFTAREVARLMGFPESLEWSKSNVTEKCMYRLLGNSI |
| | | NVKVVSYLISLLLEPLNF |
| 617 | Arabidopsis | MVMSHIFLISQIQEVEHGDSDDVNWNTDDDELAIDNFQF |
| | DRM1 | SPSPVHISATSPNSIQNRISDETVASFVEMGFSTQMIARAI |
| | | EETAGANMEPMMILETLFNYSASTEASSSKSKVINHFIA |
| | | MGFPEEHVIKAMQEHGDEDVGEITNALLTYAEVDKLRE |
| | | SEDMNININDDDDDNLYSLSSDDEEDELNNSSNEDRILQ |
| | | ALIKMGYLREDAAIAIERCGEDASMEEVVDFICAAQMAR |
| | | QFDEIYAEPDKKELMNNNKKRRTYTETPRKPNTDQLISL |
| | | PKEMIGFGVPNHPGLMMHRPVPIPDIARGPPFFYYENVA |
| | | MTPKGVWAKISSHLYDIVPEFVDSKHFCAAARKRGYIHN |
| | | LPIQNRFQIQPPQHNTIQEAFPLTKRWWPSWDGRTKLNC |
| | | LLTCIASSRLTEKIREALERYDGETPLDVQKWVMYECKK |
| | | WNLVWVGKNKLAPLDADEMEKLLGFPRDHTRGGGIST |
| | | TDRYKSLGNSFQVDTVAYHLSVLKPLFPNGINVLSLFTGI |
| | | GGGEVALHRLQIKMNVVVSVEISDANRNILRSFWEQTN |
| | | QKGILREFKDVQKLDDNTIERLMDEYGGFDLVIGGSPCN |
| | | NLAGGNRHHRVGLGGEHSSLFFDYCRILEAVRRKARHM |
| | | RR |
| 618 | Arabadopsis | MVIWNNDDDDFLEIDNFQSSPRSSPIHAMQCRVENLAGV |
| | DRM2 | AVTTSSLSSPTETTDLVQMGFSDEVFATLFDMGFPVEMIS |
| | | RAIKETGPNVETSVIIDTISKYSSDCEAGSSKSKAIDHFLA |
| | | MGFDEEKVVKAIQEHGEDNMEAIANALLSCPEAKKLPA |
| | | AVEEEDGIDWSSSDDDTNYTDMLNSDDEKDPNSNENGS |
| | | KIRSLVKMGFSELEASLAVERCGENVDIAELTDFLCAAQ |
| | | MAREFSEFYTEHEEQKPRHNIKKRRFESKGEPRSSVDDE |
| | | PIRLPNPMIGFGVPNEPGLITHRSLPELARGPPFFYYENVA |
| | | LTPKGVWETISRHLFEIPPEFVDSKYFCVAARKRGYIHNL |
| | | PINNRFQIQPPPKYTIHDAFPLSKRWWPEWDKRTKLNCIL |
| | | TCTGSAQLTNRIRVALEPYNEEPEPPKHVQRYVIDQCKK |
| | | WNLVWVGKNKAAPLEPDEMESILGFPKNHTRGGGMSR |
| | | TERFKSLGNSFQVDTVAYHLSVLKPIFPHGINVLSLFTGIG |
| | | GGEVALHRLQIKMKLVVSVEISKVNRNILKDFWEQTNQ |
| | | TGELIEFSDIQHLTNDTIEGLMEKYGGFDLVIGGSPCNNL |
| | | AGGNRVSRVGLEGDQSSLFFEYCRILEVVRARMRGS |
| 619 | Arabadopsis | MAARNKQKKRAEPESDLCFAGKPMSVVESTIRWPHRYQ |
| | CMT1 | SKKTKLQAPTKKPANKGGKKEDEEIIKQAKCHFDKALV |
| | | DGVLINLNDDVYVTGLPGKLKFIAKVIELFEADDGVPYC |
| | | RFRWYYRPEDTLIERFSHLVQPKRVFLSNDENDNPLTCI |
| | | WSKVNIAKVPLPKITSRIEQRVIPPCDYYYDMKYEVPYL |
| | | NFTSADDGSDASSSLSSDSALNCFENLHKDEKFLLDLYS |
| | | GCGAMSTGFCMGASISGVKLITKWSVDINKFACDSLKLN |
| | | HPETEVRNEAAEDFLALLKEWKRLCEKFSLVSSTEPVESI |
| | | SELEDEEVEENDDIDEASTGAELEPGEFEVEKFLGIMFGD |
| | | PQGTGEKTLQLMVRWKGYNSSYDTWEPYSGLGNCKEK |
| | | LKEYVIDGFKSHLLPLPGTVYTVCGGPPCQGISGYNRYR |
| | | NNEAPLEDQKNQQLLVFLDIIDFLKPNYVLMENVVDLLR |
| | | FSKGFLARHAVASFVAMNYQTRLGMMAAGSYGLPQLR |
| | | NRVFLWAAQPSEKLPPYPLPTHEVAKKENTPKEFKDLQV |
| | | GRIQMEFLKLDNALTLADAISDLPPVTNYVANDVMDYN |
| | | DAAPKTEFENFISLKRSETLLPAFGGDPTRRLFDHQPLVL |
| | | GDDDLERVSYIPKQKGANYRDMPGVLVHNNKAEINPRF |
| | | RAKLKSGKNVVPAYAISFIKGKSKKPFGRLWGDEIVNTV |
| | | VTRAEPHNQCVIHPMQNRVLSVRENARLQGFPDCYKLC |
| | | GTIKEKYIQVGNAVAVPVGVALGYAFGMASQGLTDDEP |
| | | VIKLPFKYPECMQAKDQI |
| 620 | Arabadopsis | MLSPAKCESEEAQAPLDLHSSSRSEPECLSLVLWCPNPEE |
| | CMT2 | AAPSSTRELIKLPDNGEMSLRRSTTLNCNSPEENGGEGRV |
| | | SQRKSSRGKSQPLLMLTNGCQLRRSPRFRALHANFDNV |
| | | CSVPVTKGGVSQRKFSRGKSQPLLTLTNGCQLRRSPRFR |
| | | AVDGNFDSVCSVPVTGKFGSRKRKSNSALDKKESSDSE |
| | | GLTFKDIAVIAKSLEMEIISECQYKNNVAEGRSRLQDPAK |
| | | RKVDSDTLLYSSINSSKQSLGSNKRMRRSQRFMKGTENE |
| | | GEENLGKSKGKGMSLASCSFRRSTRLSGTVETGNTETLN |
| | | RRKDCGPALCGAEQVRGTERLVQISKKDHCCEAMKKCE |
| | | GDGLVSSKQELLVFPSGCIKKTVNGCRDRTLGKPRSSGL |
| | | NTDDIHTSSLKISKNDTSNGLTMTTALVEQDAMESLLQG |
| | | KTSACGAADKGKTREMHVNSTVIYLSDSDEPSSIEYLNG |
| | | DNLTQVESGSALSSGGNEGIVSLDLNNPTKSTKRKGKRV |
| | | TRTAVQEQNKRSICFFIGEPLSCEEAQERWRWRYELKER |
| | | KSKSRGQQSEDDEDKIVANVECHYSQAKVDGHTFSLGD |
| | | FAYIKGEEEETHVGQIVEFFKTTDGESYFRVQWFYRATD |
| | | TIMERQATNHDKRRLFYSTVMNDNPVDCLISKVTVLQV |
| | | SPRVGLKPNSIKSDYYFDMEYCVEYSTFQTLRNPKTSEN |
| | | KLECCADVVPTESTESILKKKSFSGELPVLDLYSGCGGM |
| | | STGLSLGAKISGVDVVTKWAVDQNTAACKSLKLNHPNT |
| | | QVRNDAAGDFLQLLKEWDKLCKRYVFNNDQRTDTLRS |
| | | VNSTKETSGSSSSSDDDSDSEEYEVEKLVDICFGDHDKT |
| | | GKNGLKFKVHWKGYRSDEDTWELAEELSNCQDAIREFV |
| | | TSGFKSKILPLPGRVGVICGGPPCQGISGYNRHRNVDSPL |
| | | NDERNQQIIVFMDIVEYLKPSYVLMENVVDILRMDKGSL |
| | | GRYALSRLVNMRYQARLGIMTAGCYGLSQFRSRVFMW |
| | | GAVPNKNLPPFPLPTHDVIVRYGLPLEFERNVVAYAEGQ |
| | | PRKLEKALVLKDAISDLPHVSNDEDREKLPYESLPKTDF |
| | | QRYIRSTKRDLTGSAIDNCNKRTMLLHDHRPFHINEDDY |
| | | ARVCQIPKRKGANFRDLPGLIVRNNTVCRDPSMEPVILPS |
| | | GKPLVPGYVFTFQQGKSKRPFARLWWDETVPTVLTVPT |
| | | CHSQALLHPEQDRVLTIRESARLQGFPDYFQFCGTIKERY |
| | | CQIGNAVAVSVSRALGYSLGMAFRGLARDEHLIKLPQNF |
| | | SHSTYPQLQETIPH |
| 621 | Arabadopsis | MAPKRKRPATKDDTTKSIPKPKKRAPKRAKTVKEEPVT |
| | CMT3 | VVEEGEKHVARFLDEPIPESEAKSTWPDRYKPIEVQPPKA |
| | | SSRKKTKDDEKVEIIRARCHYRRAIVDERQIYELNDDAY |
| | | VQSGEGKDPFICKIIEMFEGANGKLYFTARWFYRPSDTV |
| | | MKEFEILIKKKRVFFSEIQDTNELGLLEKKLNILMIPLNEN |
| | | TKETIPATENCDFFCDMNYFLPYDTFEAIQQETMMAISES |
| | | STISSDTDIREGAAAISEIGECSQETEGHKKATLLDLYSGC |
| | | GAMSTGLCMGAQLSGLNLVTKWAVDMNAHACKSLQH |
| | | NHPETNVRNMTAEDFLFLLKEWEKLCIHFSLRNSPNSEE |
| | | YANLHGLNNVEDNEDVSEESENEDDGEVFTVDKIVGISF |
| | | GVPKKLLKRGLYLKVRWLNYDDSHDTWEPIEGLSNCRG |
| | | KIEEFVKLGYKSGILPLPGGVDVVCGGPPCQGISGHNRFR |
| | | NLLDPLEDQKNKQLLVYMNIVEYLKPKFVLMENVVDM |
| | | LKMAKGYLARFAVGRLLQMNYQVRNGMMAAGAYGL |
| | | AQFRLRFFLWGALPSEIIPQFPLPTHDLVHRGNIVKEFQG |
| | | NIVAYDEGHTVKLADKLLLKDVISDLPAVANSEKRDEIT |
| | | YDKDPTTPFQKFIRLRKDEASGSQSKSKSKKHVLYDHHP |
| | | LNLNINDYERVCQVPKRKGANFRDFPGVIVGPGNVVKL |
| | | EEGKERVKLESGKTLVPDYALTYVDGKSCKPFGRLWW |
| | | DEIVPTVVTRAEPHNQVIIHPEQNRVLSIRENARLQGFPD |
| | | DYKLFGPPKQKYIQVGNAVAVPVAKALGYALGTAFQGL |
| | | AVGKDPLLTLPEGFAFMKPTLPSELA |
| 622 | Neurospora | MAEQNPFVIDDEDDVIQIHDEEEVEEEVAEVIDITEDDIEP |
| | Rid | SELDRAFGSRPKEETLPSLLLRDQGFIVRPGMTVELKAPI |
| | | GRFAISFVRVNSIVKVRQAHVNNVTIRGHGFTRAKEMNG |
| | | MLPKQLNECCLVASIDTRDPRP |
| 623 | E. coli | MNNNDLVAKLWKLCDNLRDGGVSYQNYVNELASLLFL |
| | strain | KMCKETGQEAEYLPEGYRWDDLKSRIGQEQLQFYRKM |
| | 12 hsdM | LVHLGEDDKKLVQAVFHNVSTTITEPKQITALVSNMDSL |
| | | DWYNGAHGKSRDDFGDMYEGLLQKNANETKSGAGQY |
| | | FTPRPLIKTIIHLLKPQPREVVQDPAAGTAGFLIEADRYVK |
| | | SQTNDLDDLDGDTQDFQIHRAFIGLELVPGTRRLALMNC |
| | | LLHDIEGNLDHGGAIRLGNTLGSDGENLPKAHIVATNPPF |
| | | GSAAGTNITRTFVHPTSNKQLCFMQHIIETLHPGGRAAV |
| | | VVPDNVLFEGGKGTDIRRDLMDKCHLHTILRLPTGIFYA |
| | | QGVKTNVLFFTKGTVANPNQDKNCTDDVWVYDLRTNM |
| | | PSFGKRTPFTDEHLQPFERVYGEDPHGLSPRTEGEWSFN |
| | | AEETEVADSEENKNTDQHLATSRWRKFSREWIRTAKSD |
| | | SLDISWLKDKDSIDADSLPEPDVLAAEAMGELVQALSEL |
| | | DALMRELGASDEADLQRQLLEEAFGGVKE |
| 624 | E. coli | MSAGKLPEGWVIAPVSTVTTLIRGVTYKKEQAINYLKDD |
| | strain | YLPLIRANNIQNGKFDTTDLVFVPKNLVKESQKISPEDIVI |
| | 12 hsdS | AMSSGSKSVVGKSAHQHLPFECSFGAFCGVLRPEKLIFS |
| | | GFIAHFTKSSLYRNKISSLSAGANINNIKPASFDLINIPIPPL |
| | | AEQKIIAEKLDTLLAQVDSTKARFEQIPQILKRFRQAVLG |
| | | GAVNGKLTEKWRNFEPQHSVFKKLNFESILTELRNGLSS |
| | | KPNESGVGHPILRISSVRAGHVDQNDIRFLECSESELNRH |
| | | KLQDGDLLFTRYNGSLEFVGVCGLLKKLQHQNLLYPDK |
| | | LIRARLTKDALPEYIEIFFSSPSARNAMMNCVKTTSGQKG |
| | | ISGKDIKSQVVLLPPVKEQAEIVRRVEQLFAYADTIEKQV |
| | | NNALARVNNLTQSILAKAFRGELTAQWRAENPDLISGEN |
| | | SAAALLEKIKAERAASGGKKASRKKS |
| 625 | T. aquaticus | MGLPPLLSLPSNSAPRSLGRVETPPEVVDFMVSLAEAPR |
| | M TaqI | GGRVLEPACAHGPFLRAFREAHGTAYRFVGVEIDPKALD |
| | | LPPWAEGILADFLLWEPGEAFDLILGNPPYGIVGEASKYP |
| | | IHVFKAVKDLYKKAFSTWKGKYNLYGAFLEKAVRLLKP |
| | | GGVLVFVVPATWLVLEDFALLREFLAREGKTSVYYLGE |
| | | VFPQKKVSAVVIRFQKSGKGLSLWDTQESESGFTPILWA |
| | | EYPHWEGEIIRFETEETRKLEISGMPLGDLFHIRFAARSPE |
| | | FKKHPAVRKEPGPGLVPVLTGRNLKPGWVDYEKNHSGL |
| | | WMPKERAKELRDFYATPHLVVAHTKGTRVVAAWDERA |
| | | YPWREEFHLLPKEGVRLDPSSLVQWLNSEAMQKHVRTL |
| | | YRDFVPHLTLRMLERLPVRREYGFHTSPESARNF |
| 626 | E. coli M | MKKNRAFLKWAGGKYPLLDDIKRHLPKGECLVEPFVGA |
| | EcoDam | GSVFLNTDFSRYILADINSDLISLYNIVKMRTDEYVQAAR |
| | | ELFVPETNCAEVYYQFREEFNKSQDPFRRAVLFLYLNRY |
| | | GYNGLCRYNLRGEFNVPFGRYKKPYFPEAELYHFAEKA |
| | | QNAFFYCESYADSMARADDASVVYCDPPYAPLSATANF |
| | | TAYHTNSFTLEQQAHLAEIAEGLVERHIPVLISNHDTMLT |
| | | REWYQRAKLHVVKVRRSISSNGGTRKKVDELLALYKPG |
| | | VVSPAKK |
| 627 | C. crescentus | MKFGPETIIHGDCIEQMNALPEKSVDLIFADPPYNLQLGG |
| | M CcrMI | DLLRPDNSKVDAVDDHWDQFESFAAYDKFTREWLKAA |
| | | RRVLKDDGAIWVIGSYHNIFRVGVAVQDLGFWILNDIV |
| | | WRKSNPMPNFKGTRFANAHETLIWASKSQNAKRYTFNY |
| | | DALKMANDEVQMRSDWTIPLCTGEERIKGADGQKAHPT |
| | | QKPEALLYRVILSTTKPGDVILDPFFGVGTTGAAAKRLG |
| | | RKFIGIEREAEYLEHAKARIAKVVPIAPEDLDVMGSKRAE |
| | | PRVPFGTIVEAGLLSPGDTLYCSKGTHVAKVRPDGSITVG |
| | | DLSGSIHKIGALVQSAPACNGWTYWHFKTDAGLAPIDVL |
| | | RAQVRAGMN |
| 628 | C. difficile | MDDISQDNFLLSKEYENSLDVDTKKASGIYYTPKIIVDYI |
| | CamA | VKKTLKNHDIIKNPYPRILDISCGCGNFLLEVYDILYDLFE |
| | | ENIYELKKKYDENYWTVDNIHRHILNYCIYGADIDEKAIS |
| | | ILKDSLTNKKVVNDLDESDIKINLFCCDSLKKKWRYKFD |
| | | YIVGNPPYIGHKKLEKKYKKFLLEKYSEVYKDKADLYFC |
| | | FYKKIIDILKQGGIGSVITPRYFLESLSGKDLREYIKSNVN |
| | | VQEIVDFLGANIFKNIGVSSCILTFDKKKTKETYIDVFKIK |
| | | NEDICINKFETLEELLKSSKFEHFNINQRLLSDEWILVNKD |
| | | DETFYNKIQEKCKYSLEDIAISFQGIITGCDKAFILSKDDV |
| | | KLNLVDDKFLKCWIKSKNINKYIVDKSEYRLIYSNDIDNE |
| | | NTNKRILDEIIGLYKTKLENRRECKSGIRKWYELQWGRE |
| | | KLFFERKKIMYPYKSNENRFAIDYDNNFSSADVYSFFIKE |
| | | EYLDKFSYEYLVGILNSSVYDKYFKITAKKMSKNIYDYY |
| | | PNKVMKIRIFRDNNYEEIENLSKQIISILLNKSIDKGKVEK |
| | | LQIKMDNLIMDSLGI |
| 629 | KAP1 | MAASAAAASAAAASAASGSPGPGEGSAGGEKRSTAPSA |
| | | AASASASAAASSPAGGGAEALELLEHCGVCRERLRPERE |
| | | PRLLPCLHSACSACLGPAAPAAANSSGDGGAAGDGTVV |
| | | DCPVCKQQCFSKDIVENYFMRDSGSKAATDAQDANQCC |
| | | TSCEDNAPATSYCVECSEPLCETCVEAHQRVKYTKDHT |
| | | VRSTGPAKSRDGERTVYCNVHKHEPLVLFCESCDTLTCR |
| | | DCQLNAHKDHQYQFLEDAVRNQRKLLASLVKRLGDKH |
| | | ATLQKSTKEVRSSIRQVSDVQKRVQVDVKMAILQIMKEL |
| | | NKRGRVLVNDAQKVTEGQQERLERQHWTMTKIQKHQE |
| | | HILRFASWALESDNNTALLLSKKLIYFQLHRALKMIVDP |
| | | VEPHGEMKFQWDLNAWTKSAEAFGKIVAERPGTNSTGP |
| | | APMAPPRAPGPLSKQGSGSSQPMEVQEGYGFGSGDDPY |
| | | SSAEPHVSGVKRSRSGEGEVSGLMRKVPRVSLERLDLDL |
| | | TADSQPPVFKVFPGSTTEDYNLIVIERGAAAAATGQPGT |
| | | APAGTPGAPPLAGMAIVKEEETEAAIGAPPTATEGPETKP |
| | | VLMALAEGPGAEGPRLASPSGSTSSGLEVVAPEGTSAPG |
| | | GGPGTLDDSATICRVCQKPGDLVMCNQCEFCFHLDCHL |
| | | PALQDVPGEEWSCSLCHVLPDLKEEDGSLSLDGADSTGV |
| | | VAKLSPANQRKCERVLLALFCHEPCRPLHQLATDSTESL |
| | | DQPGGTLDLTLIRARLQEKLSPPYSSPQEFAQDVGRMFK |
| | | QFNKLTEDKADVQSIIGLQRFFETRMNEAFGDTKFSAVL |
| | | VEPPPMSLPGAGLSSQELSGGPGDGP |
| 630 | MECP2 | MVAGMLGLREEKSEDQDLQGLKDKPLKFKKVKKDKKE |
| | | EKEGKHEPVQPSAHHSAEPAEAGKAETSEGSGSAPAVPE |
| | | ASASPKQRRSIIRDRGPMYDDPTLPEGWTRKLKQRKSGR |
| | | SAGKYDVYLINPQGKAFRSKVELIAYFEKVGDTSLDPND |
| | | FDFTVTGRGSPSRREQKPPKKPKSPKAPGTGRGRGRPKG |
| | | SGTTRPKAATSEGVQVKRVLEKSPGKLLVKMPFQTSPG |
| | | GKAEGGGATTSTQVMVIKRPGRKRKAEADPQAIPKKRG |
| | | RKPGSVVAAAAAEAKKKAVKESSIRSVQETVLPIKKRKT |
| | | RETVSIEVKEVVKPLLVSTLGEKSGKGLKTCKSPGRKSK |
| | | ESSPKGRSSSASSPPKKEHHHHHHHSESPKAPVPLLPPLP |
| | | PPPPEPESSEDPTSPPEPQDLSSSVCKEEKMPRGGSLESDG |
| | | CPKEPAKTQPAVATAATAAEKYKHRGEGERKDIVSSSM |
| | | PRPNREEPVDSRTPVTERVS |
| 631 | linker | SGGS |
| 632 | linker | SGGSSGSETPGTSESATPESSGGS |
| 633 | linker | SGGSSGGSSGSETPGTSESATPESSGGSSGGS |
| 634 | linker | GGSGGSPGSPAGSPTSTEEGTSESATPESGPGTSTEPSEGS |
| | | APGSPAGSPTSTEEGTSTEPSEGSAPGTSTEPSEGSAPGTS |
| | | ESATPESGPGSEPATSGGSGGS |
| 635 | G linker | GSGGG |
| 636 | GX4 linker | GGGGSGGGGSGGGGSGGGGS |
| 637 | W linker | SSGNSNANSRGPSFSSGLVPLSLRGSH |
| 638 | XTEN linker | SGSETPGTSESATPES |
| | (XTEN16) | |
| 639 | XTEN linker | SGGSSGGSSGSETPGTSESATPES |
| 640 | XTEN linker | SGGSSGGSSGSETPGTSESATPESSGGSSGGSSGGSSGGS |
| 641 | XTEN linker | SGGSSGGSSGSETPGTSESATPESSGGSSGGSSGGSSGGSS |
| | | GSETPGTSESATPESSGGSSGGS |
| 642 | XTEN linker | PGSPAGSPTSTEEGTSESATPESGPGTSTEPSEGSAPGSPA |
| | | GSPTSTEEGTSTEPSEGSAPGTSTEPSEGSAPGTSESATPE |
| | | SGPGSEPATS |
| 643 | XTEN linker | GGPSSGAPPPSGGSPAGSPTSTEEGTSESATPESGPGTSTE |
| | (XTEN80) | PSEGSAPGSPAGSPTSTEEGTSTEPSEGSAPGTSTEPSE |
| 644 | NLS | PKKKRKV |
| 645 | NLS | AVKRPAATKKAGQAKKKKLD |
| 646 | NLS | MSRRRKANPTKLSENAKKLAKEVEN |
| 647 | NLS | PAAKRVKLD |
| 648 | NLS | KLKIKRPVK |
| 649 | NLS | MDSLLMNRRKFLYQFKNVRWAKGRRETYLC |
| 660 | fusion protein | MGTMPKKKRKVPKKKRKVYNHDQEFDPPKVYPPVPAE |
| | (Configuration | KRKPIRVLSLFDGIATGLLVLKDLGIQVDRYIASEVCEDSI |
| | 7) | TVGMVRHQGKIMYVGDVRSVTQKHIQEWGPFDLVIGGS |
| | | PCNDLSIVNPARKGLYEGTGRLFFEFYRLLHDARPKEGD |
| | | DRPFFWLFENVVAMGVSDKRDISRFLESNPVMIDAKEVS |
| | | AAHRARYFWGNLPGMNRPLASTVNDKLELQECLEHGRI |
| | | AKFSKVRTITTRSNSIKQGKDQHFPVFMNEKEDILWCTE |
| | | MERVFGFPVHYTDVSNMSRLARQRLLGRSWSVPVIRHL |
| | | FAPLKEYFACVSSGNSNANSRGPSFSSGLVPLSLRGSHM |
| | | AAIPALDPEAEPSMDVILVGSSELSSSVSPGTGRDLIAYE |
| | | VKANQRNIEDICICCGSLQVHTQHPLFEGGICAPCKDKFL |
| | | DALFLYDDDGYQSYCSICCSGETLLICGNPDCTRCYCFE |
| | | CVDSLVGPGTSGKVHAMSNWVCYLCLPSSRSGLLQRRR |
| | | KWRSQLKAFYDRESENPLEMFETVPVWRRQPVRVLSLF |
| | | EDIKKELTSLGFLESGSDPGQLKHVVDVTDTVRKDVEE |
| | | WGPFDLVYGATPPLGHTCDRPPSWYLFQFHRLLQYARP |
| | | KPGSPRPFFWMFVDNLVLNKEDLDVASRFLEMEPVTIPD |
| | | VHGGSLQNAVRVWSNIPAIRSRHWALVSEEELSLLAQN |
| | | KQSSKLAAKWPTKLVKNCFLPLREYFKYFSTELTSSLGG |
| | | PSSGAPPPSGGSPAGSPTSTEEGTSESATPESGPGTSTEPSE |
| | | GSAPGSPAGSPTSTEEGTSTEPSEGSAPGTSTEPSELEDKK |
| | | YSIGLAIGTNSVGWAVITDEYKVPSKKFKVLGNTDRHSI |
| | | KKNLIGALLFDSGETAEATRLKRTARRRYTRRKNRICYL |
| | | QEIFSNEMAKVDDSFFHRLEESFLVEEDKKHERHPIFGNI |
| | | VDEVAYHEKYPTIYHLRKKLVDSTDKADLRLIYLALAH |
| | | MIKFRGHFLIEGDLNPDNSDVDKLFIQLVQTYNQLFEENP |
| | | INASGVDAKAILSARLSKSRRLENLIAQLPGEKKNGLFGN |
| | | LIALSLGLTPNFKSNFDLAEDAKLQLSKDTYDDDLDNLL |
| | | AQIGDQYADLFLAAKNLSDAILLSDILRVNTEITKAPLSA |
| | | SMIKRYDEHHQDLTLLKALVRQQLPEKYKEIFFDQSKNG |
| | | YAGYIDGGASQEEFYKFIKPILEKMDGTEELLVKLNRED |
| | | LLRKQRTFDNGSIPHQIHLGELHAILRRQEDFYPFLKDNR |
| | | EKIEKILTFRIPYYVGPLARGNSRFAWMTRKSEETITPWN |
| | | FEEVVDKGASAQSFIERMTNFDKNLPNEKVLPKHSLLYE |
| | | YFTVYNELTKVKYVTEGMRKPAFLSGEQKKAIVDLLFK |
| | | TNRKVTVKQLKEDYFKKIECFDSVEISGVEDRFNASLGT |
| | | YHDLLKIIKDKDFLDNEENEDILEDIVLTLTLFEDREMIEE |
| | | RLKTYAHLFDDKVMKQLKRRRYTGWGRLSRKLINGIRD |
| | | KQSGKTILDFLKSDGFANRNFMQLIHDDSLTFKEDIQKA |
| | | QVSGQGDSLHEHIANLAGSPAIKKGILQTVKVVDELVKV |
| | | MGRHKPENIVIEMARENQTTQKGQKNSRERMKRIEEGIK |
| | | ELGSQILKEHPVENTQLQNEKLYLYYLQNGRDMYVDQE |
| | | LDINRLSDYDVDAIVPQSFLKDDSIDNKVLTRSDKNRGK |
| | | SDNVPSEEVVKKMKNYWRQLLNAKLITQRKFDNLTKAE |
| | | RGGLSELDKAGFIKRQLVETRQITKHVAQILDSRMNTKY |
| | | DENDKLIREVKVITLKSKLVSDFRKDFQFYKVREINNYH |
| | | HAHDAYLNAVVGTALIKKYPKLESEFVYGDYKVYDVR |
| | | KMIAKSEQEIGKATAKYFFYSNIMNFFKTEITLANGEIRK |
| | | RPLIETNGETGEIVWDKGRDFATVRKVLSMPQVNIVKKT |
| | | EVQTGGFSKESILPKRNSDKLIARKKDWDPKKYGGFDSP |
| | | TVAYSVLVVAKVEKGKSKKLKSVKELLGITIMERSSFEK |
| | | NPIDFLEAKGYKEVKKDLIIKLPKYSLFELENGRKRMLAS |
| | | AGELQKGNELALPSKYVNFLYLASHYEKLKGSPEDNEQ |
| | | KQLFVEQHKHYLDEIIEQISEFSKRVILADANLDKVLSAY |
| | | NKHRDKPIREQAENIIHLFTLTNLGAPAAFKYFDTTIDRK |
| | | RYTSTKEVLDATLIHQSITGLYETRIDLSQLGGDSPKKKR |
| | | KVGVDGSSGSETPGTSESATPESRTLVTFKDVFVDFTREE |
| | | WKLLDTAQQIVYRNVMLENYKNLVSLGYQLTKPDVILR |
| | | LEKGEEPSADYKDDDDKAPKKKRKVPKKKRKV |
| 661 | fusion protein | MGTMPKKKRKVPKKKRKVYNHDQEFDPPKVYPPVPAE |
| | (Configuration | KRKPIRVLSLFDGIATGLLVLKDLGIQVDRYIASEVCEDSI |
| | 9) | TVGMVRHQGKIMYVGDVRSVTQKHIQEWGPFDLVIGGS |
| | | PCNDLSIVNPARKGLYEGTGRLFFEFYRLLHDARPKEGD |
| | | DRPFFWLFENVVAMGVSDKRDISRFLESNPVMIDAKEVS |
| | | AAHRARYFWGNLPGMNRPLASTVNDKLELQECLEHGRI |
| | | AKFSKVRTITTRSNSIKQGKDQHFPVFMNEKEDILWCTE |
| | | MERVFGFPVHYTDVSNMSRLARQRLLGRSWSVPVIRHL |
| | | FAPLKEYFACVSSGNSNANSRGPSFSSGLVPLSLRGSHM |
| | | AAIPALDPEAEPSMDVILVGSSELSSSVSPGTGRDLIAYE |
| | | VKANQRNIEDICICCGSLQVHTQHPLFEGGICAPCKDKFL |
| | | DALFLYDDDGYQSYCSICCSGETLLICGNPDCTRCYCFE |
| | | CVDSLVGPGTSGKVHAMSNWVCYLCLPSSRSGLLQRRR |
| | | KWRSQLKAFYDRESENPLEMFETVPVWRRQPVRVLSLF |
| | | EDIKKELTSLGFLESGSDPGQLKHVVDVTDTVRKDVEE |
| | | WGPFDLVYGATPPLGHTCDRPPSWYLFQFHRLLQYARP |
| | | KPGSPRPFFWMFVDNLVLNKEDLDVASRFLEMEPVTIPD |
| | | VHGGSLQNAVRVWSNIPAIRSRHWALVSEEELSLLAQN |
| | | KQSSKLAAKWPTKLVKNCFLPLREYFKYFSTELTSSLGG |
| | | PSSGAPPPSGGSPAGSPTSTEEGTSESATPESGPGTSTEPSE |
| | | GSAPGSPAGSPTSTEEGTSTEPSEGSAPGTSTEPSELEDKK |
| | | YSIGLAIGTNSVGWAVITDEYKVPSKKFKVLGNTDRHSI |
| | | KKNLIGALLFDSGETAEATRLKRTARRRYTRRKNRICYL |
| | | QEIFSNEMAKVDDSFFHRLEESFLVEEDKKHERHPIFGNI |
| | | VDEVAYHEKYPTIYHLRKKLVDSTDKADLRLIYLALAH |
| | | MIKFRGHFLIEGDLNPDNSDVDKLFIQLVQTYNQLFEENP |
| | | INASGVDAKAILSARLSKSRRLENLIAQLPGEKKNGLFGN |
| | | LIALSLGLTPNFKSNFDLAEDAKLQLSKDTYDDDLDNLL |
| | | AQIGDQYADLFLAAKNLSDAILLSDILRVNTEITKAPLSA |
| | | SMIKRYDEHHQDLTLLKALVRQQLPEKYKEIFFDQSKNG |
| | | YAGYIDGGASQEEFYKFIKPILEKMDGTEELLVKLNRED |
| | | LLRKQRTFDNGSIPHQIHLGELHAILRRQEDFYPFLKDNR |
| | | EKIEKILTFRIPYYVGPLARGNSRFAWMTRKSEETITPWN |
| | | FEEVVDKGASAQSFIERMTNFDKNLPNEKVLPKHSLLYE |
| | | YFTVYNELTKVKYVTEGMRKPAFLSGEQKKAIVDLLFK |
| | | TNRKVTVKQLKEDYFKKIECFDSVEISGVEDRFNASLGT |
| | | YHDLLKIIKDKDFLDNEENEDILEDIVLTLTLFEDREMIEE |
| | | RLKTYAHLFDDKVMKQLKRRRYTGWGRLSRKLINGIRD |
| | | KQSGKTILDFLKSDGFANRNFMQLIHDDSLTFKEDIQKA |
| | | QVSGQGDSLHEHIANLAGSPAIKKGILQTVKVVDELVKV |
| | | MGRHKPENIVIEMARENQTTQKGQKNSRERMKRIEEGIK |
| | | ELGSQILKEHPVENTQLQNEKLYLYYLQNGRDMYVDQE |
| | | LDINRLSDYDVDAIVPQSFLKDDSIDNKVLTRSDKNRGK |
| | | SDNVPSEEVVKKMKNYWRQLLNAKLITQRKFDNLTKAE |
| | | RGGLSELDKAGFIKRQLVETRQITKHVAQILDSRMNTKY |
| | | DENDKLIREVKVITLKSKLVSDFRKDFQFYKVREINNYH |
| | | HAHDAYLNAVVGTALIKKYPKLESEFVYGDYKVYDVR |
| | | KMIAKSEQEIGKATAKYFFYSNIMNFFKTEITLANGEIRK |
| | | RPLIETNGETGEIVWDKGRDFATVRKVLSMPQVNIVKKT |
| | | EVQTGGFSKESILPKRNSDKLIARKKDWDPKKYGGFDSP |
| | | TVAYSVLVVAKVEKGKSKKLKSVKELLGITIMERSSFEK |
| | | NPIDFLEAKGYKEVKKDLIIKLPKYSLFELENGRKRMLAS |
| | | AGELQKGNELALPSKYVNFLYLASHYEKLKGSPEDNEQ |
| | | KQLFVEQHKHYLDEIIEQISEFSKRVILADANLDKVLSAY |
| | | NKHRDKPIREQAENIIHLFTLTNLGAPAAFKYFDTTIDRK |
| | | RYTSTKEVLDATLIHQSITGLYETRIDLSQLGGDSPKKKR |
| | | KVGVDGSSGSETPGTSESATPESTGNKKLEAVGTGIEPK |
| | | AMSQGLVTFGDVAVDFSQEEWEWLNPIQRNLYRKVML |
| | | ENYRNLASLGLCVSKPDVISSLEQGKEPWSADYKDDDD |
| | | KAPKKKRKVPKKKRKV |
| 662 | fusion protein | MGTMPKKKRKVPKKKRKVYNHDQEFDPPKVYPPVPAE |
| | (Configuration | KRKPIRVLSLFDGIATGLLVLKDLGIQVDRYIASEVCEDSI |
| | 11) | TVGMVRHQGKIMYVGDVRSVTQKHIQEWGPFDLVIGGS |
| | | PCNDLSIVNPARKGLYEGTGRLFFEFYRLLHDARPKEGD |
| | | DRPFFWLFENVVAMGVSDKRDISRFLESNPVMIDAKEVS |
| | | AAHRARYFWGNLPGMNRPLASTVNDKLELQECLEHGRI |
| | | AKFSKVRTITTRSNSIKQGKDQHFPVFMNEKEDILWCTE |
| | | MERVFGFPVHYTDVSNMSRLARQRLLGRSWSVPVIRHL |
| | | FAPLKEYFACVSSGNSNANSRGPSFSSGLVPLSLRGSHM |
| | | AAIPALDPEAEPSMDVILVGSSELSSSVSPGTGRDLIAYE |
| | | VKANQRNIEDICICCGSLQVHTQHPLFEGGICAPCKDKFL |
| | | DALFLYDDDGYQSYCSICCSGETLLICGNPDCTRCYCFE |
| | | CVDSLVGPGTSGKVHAMSNWVCYLCLPSSRSGLLQRRR |
| | | KWRSQLKAFYDRESENPLEMFETVPVWRRQPVRVLSLF |
| | | EDIKKELTSLGFLESGSDPGQLKHVVDVTDTVRKDVEE |
| | | WGPFDLVYGATPPLGHTCDRPPSWYLFQFHRLLQYARP |
| | | KPGSPRPFFWMFVDNLVLNKEDLDVASRFLEMEPVTIPD |
| | | VHGGSLQNAVRVWSNIPAIRSRHWALVSEEELSLLAQN |
| | | KQSSKLAAKWPTKLVKNCFLPLREYFKYFSTELTSSLGG |
| | | PSSGAPPPSGGSPAGSPTSTEEGTSESATPESGPGTSTEPSE |
| | | GSAPGSPAGSPTSTEEGTSTEPSEGSAPGTSTEPSELEDKK |
| | | YSIGLAIGTNSVGWAVITDEYKVPSKKFKVLGNTDRHSI |
| | | KKNLIGALLFDSGETAEATRLKRTARRRYTRRKNRICYL |
| | | QEIFSNEMAKVDDSFFHRLEESFLVEEDKKHERHPIFGNI |
| | | VDEVAYHEKYPTIYHLRKKLVDSTDKADLRLIYLALAH |
| | | MIKFRGHFLIEGDLNPDNSDVDKLFIQLVQTYNQLFEENP |
| | | INASGVDAKAILSARLSKSRRLENLIAQLPGEKKNGLFGN |
| | | LIALSLGLTPNFKSNFDLAEDAKLQLSKDTYDDDLDNLL |
| | | AQIGDQYADLFLAAKNLSDAILLSDILRVNTEITKAPLSA |
| | | SMIKRYDEHHQDLTLLKALVRQQLPEKYKEIFFDQSKNG |
| | | YAGYIDGGASQEEFYKFIKPILEKMDGTEELLVKLNRED |
| | | LLRKQRTFDNGSIPHQIHLGELHAILRRQEDFYPFLKDNR |
| | | EKIEKILTFRIPYYVGPLARGNSRFAWMTRKSEETITPWN |
| | | FEEVVDKGASAQSFIERMTNFDKNLPNEKVLPKHSLLYE |
| | | YFTVYNELTKVKYVTEGMRKPAFLSGEQKKAIVDLLFK |
| | | TNRKVTVKQLKEDYFKKIECFDSVEISGVEDRFNASLGT |
| | | YHDLLKIIKDKDFLDNEENEDILEDIVLTLTLFEDREMIEE |
| | | RLKTYAHLFDDKVMKQLKRRRYTGWGRLSRKLINGIRD |
| | | KQSGKTILDFLKSDGFANRNFMQLIHDDSLTFKEDIQKA |
| | | QVSGQGDSLHEHIANLAGSPAIKKGILQTVKVVDELVKV |
| | | MGRHKPENIVIEMARENQTTQKGQKNSRERMKRIEEGIK |
| | | ELGSQILKEHPVENTQLQNEKLYLYYLQNGRDMYVDQE |
| | | LDINRLSDYDVDAIVPQSFLKDDSIDNKVLTRSDKNRGK |
| | | SDNVPSEEVVKKMKNYWRQLLNAKLITQRKFDNLTKAE |
| | | RGGLSELDKAGFIKRQLVETRQITKHVAQILDSRMNTKY |
| | | DENDKLIREVKVITLKSKLVSDFRKDFQFYKVREINNYH |
| | | HAHDAYLNAVVGTALIKKYPKLESEFVYGDYKVYDVR |
| | | KMIAKSEQEIGKATAKYFFYSNIMNFFKTEITLANGEIRK |
| | | RPLIETNGETGEIVWDKGRDFATVRKVLSMPQVNIVKKT |
| | | EVQTGGFSKESILPKRNSDKLIARKKDWDPKKYGGFDSP |
| | | TVAYSVLVVAKVEKGKSKKLKSVKELLGITIMERSSFEK |
| | | NPIDFLEAKGYKEVKKDLIIKLPKYSLFELENGRKRMLAS |
| | | AGELQKGNELALPSKYVNFLYLASHYEKLKGSPEDNEQ |
| | | KQLFVEQHKHYLDEIIEQISEFSKRVILADANLDKVLSAY |
| | | NKHRDKPIREQAENIIHLFTLTNLGAPAAFKYFDTTIDRK |
| | | RYTSTKEVLDATLIHQSITGLYETRIDLSQLGGDSPKKKR |
| | | KVGVDGSSGSETPGTSESATPESTGDSVAFEDVAVNFTL |
| | | EEWALLDPSQKNLYRDVMRETFRNLASVGKQWEDQNIE |
| | | DPFKIPRRNISHIPERLCESKEGGQGEESADYKDDDDKAP |
| | | KKKRKVPKKKRKV |
| 663 | fusion protein | MGTMPKKKRKVPKKKRKVYNHDQEFDPPKVYPPVPAE |
| | (Configuration | KRKPIRVLSLFDGIATGLLVLKDLGIQVDRYIASEVCEDSI |
| | 13) | TVGMVRHQGKIMYVGDVRSVTQKHIQEWGPFDLVIGGS |
| | | PCNDLSIVNPARKGLYEGTGRLFFEFYRLLHDARPKEGD |
| | | DRPFFWLFENVVAMGVSDKRDISRFLESNPVMIDAKEVS |
| | | AAHRARYFWGNLPGMNRPLASTVNDKLELQECLEHGRI |
| | | AKFSKVRTITTRSNSIKQGKDQHFPVFMNEKEDILWCTE |
| | | MERVFGFPVHYTDVSNMSRLARQRLLGRSWSVPVIRHL |
| | | FAPLKEYFACVSSGNSNANSRGPSFSSGLVPLSLRGSHM |
| | | AAIPALDPEAEPSMDVILVGSSELSSSVSPGTGRDLIAYE |
| | | VKANQRNIEDICICCGSLQVHTQHPLFEGGICAPCKDKFL |
| | | DALFLYDDDGYQSYCSICCSGETLLICGNPDCTRCYCFE |
| | | CVDSLVGPGTSGKVHAMSNWVCYLCLPSSRSGLLQRRR |
| | | KWRSQLKAFYDRESENPLEMFETVPVWRRQPVRVLSLF |
| | | EDIKKELTSLGFLESGSDPGQLKHVVDVTDTVRKDVEE |
| | | WGPFDLVYGATPPLGHTCDRPPSWYLFQFHRLLQYARP |
| | | KPGSPRPFFWMFVDNLVLNKEDLDVASRFLEMEPVTIPD |
| | | VHGGSLQNAVRVWSNIPAIRSRHWALVSEEELSLLAQN |
| | | KQSSKLAAKWPTKLVKNCFLPLREYFKYFSTELTSSLGG |
| | | PSSGAPPPSGGSPAGSPTSTEEGTSESATPESGPGTSTEPSE |
| | | GSAPGSPAGSPTSTEEGTSTEPSEGSAPGTSTEPSELEDKK |
| | | YSIGLAIGTNSVGWAVITDEYKVPSKKFKVLGNTDRHSI |
| | | KKNLIGALLFDSGETAEATRLKRTARRRYTRRKNRICYL |
| | | QEIFSNEMAKVDDSFFHRLEESFLVEEDKKHERHPIFGNI |
| | | VDEVAYHEKYPTIYHLRKKLVDSTDKADLRLIYLALAH |
| | | MIKFRGHFLIEGDLNPDNSDVDKLFIQLVQTYNQLFEENP |
| | | INASGVDAKAILSARLSKSRRLENLIAQLPGEKKNGLFGN |
| | | LIALSLGLTPNFKSNFDLAEDAKLQLSKDTYDDDLDNLL |
| | | AQIGDQYADLFLAAKNLSDAILLSDILRVNTEITKAPLSA |
| | | SMIKRYDEHHQDLTLLKALVRQQLPEKYKEIFFDQSKNG |
| | | YAGYIDGGASQEEFYKFIKPILEKMDGTEELLVKLNRED |
| | | LLRKQRTFDNGSIPHQIHLGELHAILRRQEDFYPFLKDNR |
| | | EKIEKILTFRIPYYVGPLARGNSRFAWMTRKSEETITPWN |
| | | FEEVVDKGASAQSFIERMTNFDKNLPNEKVLPKHSLLYE |
| | | YFTVYNELTKVKYVTEGMRKPAFLSGEQKKAIVDLLFK |
| | | TNRKVTVKQLKEDYFKKIECFDSVEISGVEDRFNASLGT |
| | | YHDLLKIIKDKDFLDNEENEDILEDIVLTLTLFEDREMIEE |
| | | RLKTYAHLFDDKVMKQLKRRRYTGWGRLSRKLINGIRD |
| | | KQSGKTILDFLKSDGFANRNFMQLIHDDSLTFKEDIQKA |
| | | QVSGQGDSLHEHIANLAGSPAIKKGILQTVKVVDELVKV |
| | | MGRHKPENIVIEMARENQTTQKGQKNSRERMKRIEEGIK |
| | | ELGSQILKEHPVENTQLQNEKLYLYYLQNGRDMYVDQE |
| | | LDINRLSDYDVDAIVPQSFLKDDSIDNKVLTRSDKNRGK |
| | | SDNVPSEEVVKKMKNYWRQLLNAKLITQRKFDNLTKAE |
| | | RGGLSELDKAGFIKRQLVETRQITKHVAQILDSRMNTKY |
| | | DENDKLIREVKVITLKSKLVSDFRKDFQFYKVREINNYH |
| | | HAHDAYLNAVVGTALIKKYPKLESEFVYGDYKVYDVR |
| | | KMIAKSEQEIGKATAKYFFYSNIMNFFKTEITLANGEIRK |
| | | RPLIETNGETGEIVWDKGRDFATVRKVLSMPQVNIVKKT |
| | | EVQTGGFSKESILPKRNSDKLIARKKDWDPKKYGGFDSP |
| | | TVAYSVLVVAKVEKGKSKKLKSVKELLGITIMERSSFEK |
| | | NPIDFLEAKGYKEVKKDLIIKLPKYSLFELENGRKRMLAS |
| | | AGELQKGNELALPSKYVNFLYLASHYEKLKGSPEDNEQ |
| | | KQLFVEQHKHYLDEIIEQISEFSKRVILADANLDKVLSAY |
| | | NKHRDKPIREQAENIIHLFTLTNLGAPAAFKYFDTTIDRK |
| | | RYTSTKEVLDATLIHQSITGLYETRIDLSQLGGDSPKKKR |
| | | KVGVDGSSGSETPGTSESATPESTGMNNSQGRVTFEDVT |
| | | VNFTQGEWQRLNPEQRNLYRDVMLENYSNLVSVGQGE |
| | | TTKPDVILRLEQGKEPWLEEEEVLGSGRAEKNGDIGGQI |
| | | WKPKDVKESLSADYKDDDDKAPKKKRKVPKKKRKV |
| 664 | linker | GGGGS |
| 665 | linker | EAAAK |
| 666 | linker | SGGS |
| 667 | Fusion protein | MPKKKRKVPKKKRKVYNHDQEFDPPKVYPPVPAEKRK |
| | configuration | PIRVLSLFDGIATGLLVLKDLGIQVDRYIASEVCEDSITVG |
| | 11a | MVRHQGKIMYVGDVRSVTQKHIQEWGPFDLVIGGSPCN |
| | | DLSIVNPARKGLYEGTGRLFFEFYRLLHDARPKEGDDRP |
| | | FFWLFENVVAMGVSDKRDISRFLESNPVMIDAKEVSAA |
| | | HRARYFWGNLPGMNRPLASTVNDKLELQECLEHGRIAK |
| | | FSKVRTITTRSNSIKQGKDQHFPVFMNEKEDILWCTEME |
| | | RVFGFPVHYTDVSNMSRLARQRLLGRSWSVPVIRHLFAP |
| | | LKEYFACVSSGNSNANSRGPSFSSGLVPLSLRGSHMAAIP |
| | | ALDPEAEPSMDVILVGSSELSSSVSPGTGRDLIAYEVKAN |
| | | QRNIEDICICCGSLQVHTQHPLFEGGICAPCKDKFLDALF |
| | | LYDDDGYQSYCSICCSGETLLICGNPDCTRCYCFECVDS |
| | | LVGPGTSGKVHAMSNWVCYLCLPSSRSGLLQRRRKWRS |
| | | QLKAFYDRESENPLEMFETVPVWRRQPVRVLSLFEDIKK |
| | | ELTSLGFLESGSDPGQLKHVVDVTDTVRKDVEEWGPFD |
| | | LVYGATPPLGHTCDRPPSWYLFQFHRLLQYARPKPGSPR |
| | | PFFWMFVDNLVLNKEDLDVASRFLEMEPVTIPDVHGGS |
| | | LQNAVRVWSNIPAIRSRHWALVSEEELSLLAQNKQSSKL |
| | | AAKWPTKLVKNCFLPLREYFKYFSTELTSSLGGPSSGAP |
| | | PPSGGSPAGSPTSTEEGTSESATPESGPGTSTEPSEGSAPG |
| | | SPAGSPTSTEEGTSTEPSEGSAPGTSTEPSELEDKKYSIGL |
| | | AIGTNSVGWAVITDEYKVPSKKFKVLGNTDRHSIKKNLI |
| | | GALLFDSGETAEATRLKRTARRRYTRRKNRICYLQEIFSN |
| | | EMAKVDDSFFHRLEESFLVEEDKKHERHPIFGNIVDEVA |
| | | YHEKYPTIYHLRKKLVDSTDKADLRLIYLALAHMIKFRG |
| | | HFLIEGDLNPDNSDVDKLFIQLVQTYNQLFEENPINASGV |
| | | DAKAILSARLSKSRRLENLIAQLPGEKKNGLFGNLIALSL |
| | | GLTPNFKSNFDLAEDAKLQLSKDTYDDDLDNLLAQIGD |
| | | QYADLFLAAKNLSDAILLSDILRVNTEITKAPLSASMIKR |
| | | YDEHHQDLTLLKALVRQQLPEKYKEIFFDQSKNGYAGYI |
| | | DGGASQEEFYKFIKPILEKMDGTEELLVKLNREDLLRKQ |
| | | RTFDNGSIPHQIHLGELHAILRRQEDFYPFLKDNREKIEKI |
| | | LTFRIPYYVGPLARGNSRFAWMTRKSEETITPWNFEEVV |
| | | DKGASAQSFIERMTNFDKNLPNEKVLPKHSLLYEYFTVY |
| | | NELTKVKYVTEGMRKPAFLSGEQKKAIVDLLFKTNRKV |
| | | TVKQLKEDYFKKIECFDSVEISGVEDRFNASLGTYHDLL |
| | | KIIKDKDFLDNEENEDILEDIVLTLTLFEDREMIEERLKTY |
| | | AHLFDDKVMKQLKRRRYTGWGRLSRKLINGIRDKQSGK |
| | | TILDFLKSDGFANRNFMQLIHDDSLTFKEDIQKAQVSGQ |
| | | GDSLHEHIANLAGSPAIKKGILQTVKVVDELVKVMGRH |
| | | KPENIVIEMARENQTTQKGQKNSRERMKRIEEGIKELGS |
| | | QILKEHPVENTQLQNEKLYLYYLQNGRDMYVDQELDIN |
| | | RLSDYDVDAIVPQSFLKDDSIDNKVLTRSDKNRGKSDNV |
| | | PSEEVVKKMKNYWRQLLNAKLITQRKFDNLTKAERGGL |
| | | SELDKAGFIKRQLVETRQITKHVAQILDSRMNTKYDEND |
| | | KLIREVKVITLKSKLVSDFRKDFQFYKVREINNYHHAHD |
| | | AYLNAVVGTALIKKYPKLESEFVYGDYKVYDVRKMIAK |
| | | SEQEIGKATAKYFFYSNIMNFFKTEITLANGEIRKRPLIET |
| | | NGETGEIVWDKGRDFATVRKVLSMPQVNIVKKTEVQTG |
| | | GFSKESILPKRNSDKLIARKKDWDPKKYGGFDSPTVAYS |
| | | VLVVAKVEKGKSKKLKSVKELLGITIMERSSFEKNPIDFL |
| | | EAKGYKEVKKDLIIKLPKYSLFELENGRKRMLASAGELQ |
| | | KGNELALPSKYVNFLYLASHYEKLKGSPEDNEQKQLFV |
| | | EQHKHYLDEIIEQISEFSKRVILADANLDKVLSAYNKHRD |
| | | KPIREQAENIIHLFTLTNLGAPAAFKYFDTTIDRKRYTSTK |
| | | EVLDATLIHQSITGLYETRIDLSQLGGDSPKKKRKVGVD |
| | | GSSGSETPGTSESATPESTGMNNSQGRVTFEDVTVNFTQ |
| | | GEWQRLNPEQRNLYRDVMLENYSNLVSVGQGETTKPD |
| | | VILRLEQGKEPWLEEEEVLGSGRAEKNGDIGGQIWKPKD |
| | | VKESLSADYKDDDDKAPKKKRKVPKKKRKV |
| 668 | Polynucleotide | ATGCCAAAAAAGAAGAGAAAGGTACCGAAGAAAAAA |
| | Encoding Fusion | AGAAAGGTATACAATCACGATCAGGAGTTCGACCCCC |
| | Protein | CTAAGGTGTACCCACCAGTGCCTGCAGAGAAGAGGAA |
| | Configuration | GCCAATCCGGGTGCTGAGCCTGTTTGATGGCATCGCC |
| | 11a | ACCGGCCTGCTGGTGCTGAAGGATCTGGGCATCCAGG |
| | | TGGACCGGTACATCGCCTCCGAGGTGTGCGAGGATTC |
| | | TATCACCGTGGGCATGGTGCGCCACCAGGGCAAGATC |
| | | ATGTATGTGGGCGACGTGCGGTCCGTGACACAGAAGC |
| | | ACATCCAGGAGTGGGGCCCATTCGATCTGGTGATCGG |
| | | CGGCAGCCCCTGTAATGACCTGTCCATCGTGAACCCT |
| | | GCAAGGAAGGGACTGTACGAGGGAACCGGCCGGCTG |
| | | TTCTTTGAGTTTTATAGACTGCTGCACGACGCCAGGCC |
| | | TAAGGAGGGCGACGATAGACCATTCTTTTGGCTGTTC |
| | | GAGAATGTGGTGGCTATGGGCGTGAGCGATAAGAGG |
| | | GACATCTCCAGGTTTCTGGAGTCTAACCCCGTGATGAT |
| | | CGATGCAAAGGAGGTGTCCGCCGCACACAGAGCCAG |
| | | GTATTTCTGGGGCAATCTGCCAGGAATGAACAGGCCA |
| | | CTGGCAAGCACCGTGAATGACAAGCTGGAGCTGCAGG |
| | | AGTGCCTGGAGCACGGAAGGATCGCCAAGTTTTCCAA |
| | | GGTGCGCACAATCACCACACGGAGCAATTCCATCAAG |
| | | CAGGGCAAGGATCAGCACTTCCCCGTGTTCATGAACG |
| | | AGAAGGAGGACATCCTGTGGTGTACCGAGATGGAGA |
| | | GAGTGTTCGGCTTTCCAGTGCACTACACAGACGTGTCT |
| | | AACATGAGCAGGCTGGCAAGGCAGCGGCTGCTGGGC |
| | | AGATCTTGGAGCGTGCCCGTGATCAGGCACCTGTTCG |
| | | CCCCTCTGAAGGAGTATTTTGCCTGCGTGAGCAGCGG |
| | | CAACTCCAATGCCAACAGCCGGGGCCCCTCTTTCAGC |
| | | TCCGGATTGGTGCCTCTGAGCCTGAGGGGCTCCCACA |
| | | TGGCAGCAATCCCCGCCCTGGACCCCGAGGCCGAGCC |
| | | TAGCATGGACGTGATCCTGGTGGGCTCTAGCGAGCTG |
| | | TCCTCTAGCGTGTCTCCAGGAACCGGAAGGGATCTGA |
| | | TCGCATACGAGGTGAAGGCCAATCAGCGGAACATCGA |
| | | GGACATCTGTATCTGCTGTGGCAGCCTGCAGGTGCAC |
| | | ACACAGCACCCACTGTTCGAGGGAGGAATCTGCGCAC |
| | | CCTGTAAGGATAAGTTCCTGGACGCCCTGTTTCTGTAC |
| | | GACGATGACGGCTACCAGTCCTATTGCTCTATCTGCTG |
| | | TTCCGGCGAGACCCTGCTGATCTGCGGCAATCCAGAT |
| | | TGTACAAGGTGCTATTGTTTTGAGTGCGTGGACTCTCT |
| | | GGTGGGACCAGGCACCAGCGGAAAGGTGCACGCCAT |
| | | GTCCAACTGGGTGTGCTACCTGTGCCTGCCATCCTCTC |
| | | GCAGCGGACTGCTGCAGCGGAGAAGGAAGTGGAGAT |
| | | CCCAGCTGAAGGCCTTCTATGATAGGGAGTCTGAGAA |
| | | CCCCCTGGAGATGTTTGAGACCGTGCCAGTGTGGCGC |
| | | CGGCAGCCCGTGAGGGTGCTGAGCCTGTTCGAGGATA |
| | | TCAAGAAGGAGCTGACATCCCTGGGCTTTCTGGAGTC |
| | | CGGCTCTGACCCCGGACAGCTGAAGCACGTGGTGGAT |
| | | GTGACCGACACAGTGCGGAAGGATGTGGAGGAGTGG |
| | | GGCCCTTTCGACCTGGTGTACGGAGCAACCCCTCCACT |
| | | GGGACACACATGCGACAGACCCCCTTCTTGGTACCTG |
| | | TTCCAGTTTCACCGCCTGCTGCAGTATGCAAGGCCAA |
| | | AGCCAGGCAGCCCTAGACCATTCTTTTGGATGTTCGTG |
| | | GATAATCTGGTGCTGAACAAGGAGGATCTGGACGTGG |
| | | CCAGCAGGTTTCTGGAGATGGAGCCAGTGACCATCCC |
| | | AGACGTGCACGGCGGCTCCCTGCAGAATGCCGTGCGC |
| | | GTGTGGTCTAACATCCCTGCCATCAGAAGCAGGCACT |
| | | GGGCACTGGTGAGCGAGGAGGAGCTGTCCCTGCTGGC |
| | | CCAGAATAAGCAGAGCAGCAAGCTGGCCGCCAAGTG |
| | | GCCTACAAAGCTGGTGAAGAACTGCTTCCTGCCACTG |
| | | CGGGAGTACTTCAAGTATTTTTCCACCGAGCTGACATC |
| | | TAGCCTGGGAGGACCCTCCTCTGGCGCCCCACCACCT |
| | | AGCGGCGGCTCCCCTGCCGGCTCTCCAACCAGCACAG |
| | | AGGAGGGCACCAGCGAGTCCGCCACACCAGAGTCTGG |
| | | ACCTGGCACCAGCACAGAGCCATCCGAGGGCTCTGCC |
| | | CCAGGCTCTCCTGCAGGCAGCCCTACCTCCACCGAAG |
| | | AGGGCACCAGCACAGAGCCTTCTGAGGGCAGCGCCCC |
| | | AGGCACCTCTACAGAGCCAAGCGAGCTCGAGGACAA |
| | | GAAGTACAGCATCGGCCTGGCCATCGGCACCAACTCT |
| | | GTGGGCTGGGCCGTGATCACCGACGAGTACAAGGTGC |
| | | CCAGCAAGAAATTCAAGGTGCTGGGCAACACCGACCG |
| | | GCACAGCATCAAGAAGAACCTGATCGGAGCCCTGCTG |
| | | TTCGACAGCGGCGAAACAGCCGAGGCCACCCGGCTGA |
| | | AGAGAACCGCCAGAAGAAGATACACCAGACGGAAGA |
| | | ACCGGATCTGCTATCTGCAAGAGATCTTCAGCAACGA |
| | | GATGGCCAAGGTGGACGACAGCTTCTTCCACAGACTG |
| | | GAAGAGTCCTTCCTGGTGGAAGAGGATAAGAAGCACG |
| | | AGCGGCACCCCATCTTCGGCAACATCGTGGACGAGGT |
| | | GGCCTACCACGAGAAGTACCCCACCATCTACCACCTG |
| | | AGAAAGAAACTGGTGGACAGCACCGACAAGGCCGAC |
| | | CTGCGGCTGATCTATCTGGCCCTGGCCCACATGATCAA |
| | | GTTCCGGGGCCACTTCCTGATCGAGGGCGACCTGAAC |
| | | CCCGACAACAGCGACGTGGACAAGCTGTTCATCCAGC |
| | | TGGTGCAGACCTACAACCAGCTGTTCGAGGAAAACCC |
| | | CATCAACGCCAGCGGCGTGGACGCCAAGGCCATCCTG |
| | | TCTGCCAGACTGAGCAAGAGCAGACGGCTGGAAAATC |
| | | TGATCGCCCAGCTGCCCGGCGAGAAGAAGAATGGCCT |
| | | GTTCGGCAACCTGATTGCCCTGAGCCTGGGCCTGACC |
| | | CCCAACTTCAAGAGCAACTTCGACCTGGCCGAGGATG |
| | | CCAAACTGCAGCTGAGCAAGGACACCTACGACGACGA |
| | | CCTGGACAACCTGCTGGCCCAGATCGGCGACCAGTAC |
| | | GCCGACCTGTTTCTGGCCGCCAAGAACCTGTCCGACG |
| | | CCATCCTGCTGAGCGACATCCTGAGAGTGAACACCGA |
| | | GATCACCAAGGCCCCCCTGAGCGCCTCTATGATCAAG |
| | | AGATACGACGAGCACCACCAGGACCTGACCCTGCTGA |
| | | AAGCTCTCGTGCGGCAGCAGCTGCCTGAGAAGTACAA |
| | | AGAGATTTTCTTCGACCAGAGCAAGAACGGCTACGCC |
| | | GGCTACATTGACGGCGGAGCCAGCCAGGAAGAGTTCT |
| | | ACAAGTTCATCAAGCCCATCCTGGAAAAGATGGACGG |
| | | CACCGAGGAACTGCTCGTGAAGCTGAACAGAGAGGA |
| | | CCTGCTGCGGAAGCAGCGGACCTTCGACAACGGCAGC |
| | | ATCCCCCACCAGATCCACCTGGGAGAGCTGCACGCCA |
| | | TTCTGCGGCGGCAGGAAGATTTTTACCCATTCCTGAAG |
| | | GACAACCGGGAAAAGATCGAGAAGATCCTGACCTTCC |
| | | GCATCCCCTACTACGTGGGCCCTCTGGCCAGGGGAAA |
| | | CAGCAGATTCGCCTGGATGACCAGAAAGAGCGAGGA |
| | | AACCATCACCCCCTGGAACTTCGAGGAAGTGGTGGAC |
| | | AAGGGCGCTTCCGCCCAGAGCTTCATCGAGCGGATGA |
| | | CCAACTTCGATAAGAACCTGCCCAACGAGAAGGTGCT |
| | | GCCCAAGCACAGCCTGCTGTACGAGTACTTCACCGTG |
| | | TATAACGAGCTGACCAAAGTGAAATACGTGACCGAGG |
| | | GAATGAGAAAGCCCGCCTTCCTGAGCGGCGAGCAGAA |
| | | AAAGGCCATCGTGGACCTGCTGTTCAAGACCAACCGG |
| | | AAAGTGACCGTGAAGCAGCTGAAAGAGGACTACTTCA |
| | | AGAAAATCGAGTGCTTCGACTCCGTGGAAATCTCCGG |
| | | CGTGGAAGATCGGTTCAACGCCTCCCTGGGCACATAC |
| | | CACGATCTGCTGAAAATTATCAAGGACAAGGACTTCC |
| | | TGGACAATGAGGAAAACGAGGACATTCTGGAAGATAT |
| | | CGTGCTGACCCTGACACTGTTTGAGGACAGAGAGATG |
| | | ATCGAGGAACGGCTGAAAACCTATGCCCACCTGTTCG |
| | | ACGACAAAGTGATGAAGCAGCTGAAGCGGCGGAGAT |
| | | ACACCGGCTGGGGCAGGCTGAGCCGGAAGCTGATCAA |
| | | CGGCATCCGGGACAAGCAGTCCGGCAAGACAATCCTG |
| | | GATTTCCTGAAGTCCGACGGCTTCGCCAACAGAAACT |
| | | TCATGCAGCTGATCCACGACGACAGCCTGACCTTTAA |
| | | AGAGGACATCCAGAAAGCCCAGGTGTCCGGCCAGGG |
| | | CGATAGCCTGCACGAGCACATTGCCAATCTGGCCGGC |
| | | AGCCCCGCCATTAAGAAGGGCATCCTGCAGACAGTGA |
| | | AGGTGGTGGACGAGCTCGTGAAAGTGATGGGCCGGCA |
| | | CAAGCCCGAGAACATCGTGATCGAAATGGCCAGAGA |
| | | GAACCAGACCACCCAGAAGGGACAGAAGAACAGCCG |
| | | CGAGAGAATGAAGCGGATCGAAGAGGGCATCAAAGA |
| | | GCTGGGCAGCCAGATCCTGAAAGAACACCCCGTGGAA |
| | | AACACCCAGCTGCAGAACGAGAAGCTGTACCTGTACT |
| | | ACCTGCAGAATGGGCGGGATATGTACGTGGACCAGGA |
| | | ACTGGACATCAACCGGCTGTCCGACTACGATGTGGAC |
| | | GCCATCGTGCCTCAGAGCTTTCTGAAGGACGACTCCA |
| | | TCGACAACAAGGTGCTGACCAGAAGCGACAAGAACC |
| | | GGGGCAAGAGCGACAACGTGCCCTCCGAAGAGGTCGT |
| | | GAAGAAGATGAAGAACTACTGGCGGCAGCTGCTGAA |
| | | CGCCAAGCTGATTACCCAGAGAAAGTTCGACAATCTG |
| | | ACCAAGGCCGAGAGAGGCGGCCTGAGCGAACTGGAT |
| | | AAGGCCGGCTTCATCAAGAGACAGCTGGTGGAAACCC |
| | | GGCAGATCACAAAGCACGTGGCACAGATCCTGGACTC |
| | | CCGGATGAACACTAAGTACGACGAGAATGACAAGCTG |
| | | ATCCGGGAAGTGAAAGTGATCACCCTGAAGTCCAAGC |
| | | TGGTGTCCGATTTCCGGAAGGATTTCCAGTTTTACAAA |
| | | GTGCGCGAGATCAACAACTACCACCACGCCCACGACG |
| | | CCTACCTGAACGCCGTCGTGGGAACCGCCCTGATCAA |
| | | AAAGTACCCTAAGCTGGAAAGCGAGTTCGTGTACGGC |
| | | GACTACAAGGTGTACGACGTGCGGAAGATGATCGCCA |
| | | AGAGCGAGCAGGAAATCGGCAAGGCTACCGCCAAGT |
| | | ACTTCTTCTACAGCAACATCATGAACTTTTTCAAGACC |
| | | GAGATTACCCTGGCCAACGGCGAGATCCGGAAGCGGC |
| | | CTCTGATCGAGACAAACGGCGAAACCGGGGAGATCGT |
| | | GTGGGATAAGGGCCGGGATTTTGCCACCGTGCGGAAA |
| | | GTGCTGAGCATGCCCCAAGTGAATATCGTGAAAAAGA |
| | | CCGAGGTGCAGACAGGCGGCTTCAGCAAAGAGTCTAT |
| | | CCTGCCCAAGAGGAACAGCGATAAGCTGATCGCCAGA |
| | | AAGAAGGACTGGGACCCTAAGAAGTACGGCGGCTTCG |
| | | ACAGCCCCACCGTGGCCTATTCTGTGCTGGTGGTGGCC |
| | | AAAGTGGAAAAGGGCAAGTCCAAGAAACTGAAGAGT |
| | | GTGAAAGAGCTGCTGGGGATCACCATCATGGAAAGAA |
| | | GCAGCTTCGAGAAGAATCCCATCGACTTTCTGGAAGC |
| | | CAAGGGCTACAAAGAAGTGAAAAAGGACCTGATCAT |
| | | CAAGCTGCCTAAGTACTCCCTGTTCGAGCTGGAAAAC |
| | | GGCCGGAAGAGAATGCTGGCCTCTGCCGGCGAACTGC |
| | | AGAAGGGAAACGAACTGGCCCTGCCCTCCAAATATGT |
| | | GAACTTCCTGTACCTGGCCAGCCACTATGAGAAGCTG |
| | | AAGGGCTCCCCCGAGGATAATGAGCAGAAACAGCTGT |
| | | TTGTGGAACAGCACAAGCACTACCTGGACGAGATCAT |
| | | CGAGCAGATCAGCGAGTTCTCCAAGAGAGTGATCCTG |
| | | GCCGACGCTAATCTGGACAAAGTGCTGTCCGCCTACA |
| | | ACAAGCACCGGGATAAGCCCATCAGAGAGCAGGCCG |
| | | AGAATATCATCCACCTGTTTACCCTGACCAATCTGGGA |
| | | GCCCCTGCCGCCTTCAAGTACTTTGACACCACCATCGA |
| | | CCGGAAGAGGTACACCAGCACCAAAGAGGTGCTGGA |
| | | CGCCACCCTGATCCACCAGAGCATCACCGGCCTGTAC |
| | | GAGACACGGATCGACCTGTCTCAGCTGGGAGGCGACA |
| | | GCCCCAAGAAGAAGAGAAAGGTGGGAGTCGACGGAT |
| | | CCAGCGGCTCCGAGACCCCAGGCACATCTGAGAGCGC |
| | | CACCCCTGAGTCCACCGGTATGAACAATTCACAGGGG |
| | | AGAGTGACATTCGAAGACGTGACCGTGAACTTCACCC |
| | | AGGGAGAATGGCAGCGCTTGAACCCAGAACAAAGGA |
| | | ACCTCTATCGGGACGTGATGCTGGAAAACTACTCAAA |
| | | TTTGGTGAGCGTTGGGCAGGGTGAGACCACTAAGCCT |
| | | GACGTGATCCTGAGATTGGAACAGGGCAAGGAGCCTT |
| | | GGCTCGAGGAAGAGGAAGTCCTGGGCTCAGGGAGGG |
| | | CCGAGAAAAACGGTGATATAGGAGGCCAGATATGGA |
| | | AGCCTAAGGACGTCAAGGAGAGCCTGAGCGCTGATTA |
| | | CAAAGATGATGACGATAAAGCCCCCAAGAAGAAAAG |
| | | GAAGGTCCCAAAGAAAAAAAGAAAGGTG |
| 1738 | Fusion Protein | MPKKKRKVPKKKRKVNHDQEFDPPKVYPPVPAEKRKPIRVLSLFDGIATGLLV |
| | 1 Amino Acid | LKDLGIQVDRYIASEVCEDSITVGMVRHQGKIMYVGDVRSVTQKHIQEWGP |
| | Sequence | FDLVIGGSPCNDLSIVNPARKGLYEGTGRLFFEFYRLLHDARPKEGDDRPFFW |
| | NLS-NLS-3A-3L- | LFENVVAMGVSDKRDISRFLESNPVMIDAKEVSAAHRARYFWGNLPGMNR |
| | dCas9-KRAB-NLS- | PLASTVNDKLELQECLEHGRIAKFSKVRTITTRSNSIKQGKDQHFPVFMNEKE |
| | NLS | DILWCTEMERVFGFPVHYTDVSNMSRLARQRLLGRSWSVPVIRHLFAPLKEY |
| | | FACVSSGNSNANSRGPSFSSGLVPLSLRGSHNPLEMFETVPVWRRQPVRVL |
| | | SLFEDIKKELTSLGFLESGSDPGQLKHVVDVTDTVRKDVEEWGPFDLVYGATP |
| | | PLGHTCDRPPSWYLFQFHRLLQYARPKPGSPRPFFWMFVDNLVLNKEDLDV |
| | | ASRFLEMEPVTIPDVHGGSLQNAVRVWSNIPAIRSRHWALVSEEELSLLAQN |
| | | KQSSKLAAKWPTKLVKNCFLPLREYFKYFSTELTSSLGGPSSGAPPPSGGSPA |
| | | GSPTSTEEGTSESATPESGPGTSTEPSEGSAPGSPAGSPTSTEEGTSTEPSEGS |
| | | APGTSTEPSEMDKKYSIGLAIGTNSVGWAVITDEYKVPSKKFKVLGNTDRHSI |
| | | KKNLIGALLFDSGETAEATRLKRTARRRYTRRKNRICYLQEIFSNEMAKVDDSF |
| | | FHRLEESFLVEEDKKHERHPIFGNIVDEVAYHEKYPTIYHLRKKLVDSTDKADL |
| | | RLIYLALAHMIKFRGHFLIEGDLNPDNSDVDKLFIQLVQTYNQLFEENPINASG |
| | | VDAKAILSARLSKSRRLENLIAQLPGEKKNGLFGNLIALSLGLTPNFKSNFDLAE |
| | | DAKLQLSKDTYDDDLDNLLAQIGDQYADLFLAAKNLSDAILLSDILRVNTEITK |
| | | APLSASMIKRYDEHHQDLTLLKALVRQQLPEKYKEIFFDQSKNGYAGYIDGG |
| | | ASQEEFYKFIKPILEKMDGTEELLVKLNREDLLRKQRTFDNGSIPHQIHLGELH |
| | | AILRRQEDFYPFLKDNREKIEKILTFRIPYYVGPLARGNSRFAWMTRKSEETITP |
| | | WNFEEVVDKGASAQSFIERMTNFDKNLPNEKVLPKHSLLYEYFTVYNELTKV |
| | | KYVTEGMRKPAFLSGEQKKAIVDLLFKTNRKVTVKQLKEDYFKKIECFDSVEIS |
| | | GVEDRFNASLGTYHDLLKIIKDKDFLDNEENEDILEDIVLTLTLFEDREMIEERL |
| | | KTYAHLFDDKVMKQLKRRRYTGWGRLSRKLINGIRDKQSGKTILDFLKSDGF |
| | | ANRNFMQLIHDDSLTFKEDIQKAQVSGQGDSLHEHIANLAGSPAIKKGILQT |
| | | VKVVDELVKVMGRHKPENIVIEMARENQTTQKGQKNSRERMKRIEEGIKEL |
| | | GSQILKEHPVENTQLQNEKLYLYYLQNGRDMYVDQELDINRLSDYDVDAIVP |
| | | QSFLKDDSIDNKVLTRSDKNRGKSDNVPSEEVVKKMKNYWRQLLNAKLITQ |
| | | RKFDNLTKAERGGLSELDKAGFIKRQLVETRQITKHVAQILDSRMNTKYDEN |
| | | DKLIREVKVITLKSKLVSDFRKDFQFYKVREINNYHHAHDAYLNAVVGTALIKK |
| | | YPKLESEFVYGDYKVYDVRKMIAKSEQEIGKATAKYFFYSNIMNFFKTEITLAN |
| | | GEIRKRPLIETNGETGEIVWDKGRDFATVRKVLSMPQVNIVKKTEVQTGGFS |
| | | KESILPKRNSDKLIARKKDWDPKKYGGFDSPTVAYSVLVVAKVEKGKSKKLKS |
| | | VKELLGITIMERSSFEKNPIDFLEAKGYKEVKKDLIIKLPKYSLFELENGRKRML |
| | | ASAGELQKGNELALPSKYVNFLYLASHYEKLKGSPEDNEQKQLFVEQHKHYLD |
| | | EIIEQISEFSKRVILADANLDKVLSAYNKHRDKPIREQAENIIHLFTLTNLGAPA |
| | | AFKYFDTTIDRKRYTSTKEVLDATLIHQSITGLYETRIDLSQLGGDSGSETPGTS |
| | | ESATPESTGRTLVTFKDVFVDFTREEWKLLDTAQQIVYRNVMLENYKNLVSLG |
| | | YQLTKPDVILRLEKGEEPPKKKRKVPKKKRKV |
| 1739 | Fusion Protein | ATGCCAAAAAAGAAGAGAAAGGTACCGAAGAAAAAAAGAAAGGTCAAC |
| | 1 DNA Sequence | CATGATCAAGAATTCGACCCACCTAAAGTCTACCCACCTGTGCCCGCCGA |
| | | AAAAAGGAAACCCATAAGGGTGCTGTCACTCTTTGATGGCATCGCCACTG |
| | | GTCTCCTGGTTCTTAAGGATCTGGGAATTCAGGTCGATCGGTACATTGCT |
| | | AGCGAGGTTTGTGAGGATAGTATTACAGTGGGTATGGTGCGCCACCAGG |
| | | GAAAGATCATGTATGTTGGTGACGTTAGGAGCGTCACCCAGAAACATAT |
| | | CCAGGAGTGGGGACCCTTTGATTTGGTGATCGGAGGTAGTCCCTGCAAT |
| | | GACCTTTCCATCGTGAATCCAGCCAGGAAAGGGCTGTATGAAGGGACTG |
| | | GTAGGCTCTTTTTCGAGTTTTATCGCCTGCTTCACGACGCTAGACCTAAGG |
| | | AAGGTGACGATAGGCCTTTCTTTTGGCTTTTTGAGAACGTCGTGGCAATG |
| | | GGAGTCTCCGACAAAAGGGACATTTCTCGCTTTCTGGAATCTAACCCCGT |
| | | TATGATCGATGCCAAGGAAGTTTCTGCCGCTCACAGGGCAAGGTACTTCT |
| | | GGGGCAATCTGCCCGGAATGAATCGCCCACTGGCCAGTACCGTGAATGA |
| | | CAAACTGGAGCTGCAGGAGTGCCTGGAGCACGGAAGAATCGCAAAGTTT |
| | | TCTAAAGTCAGGACCATTACCACTCGCAGTAACTCCATAAAACAGGGTAA |
| | | GGACCAGCATTTTCCCGTCTTCATGAATGAAAAGGAAGATATTCTGTGGT |
| | | GCACTGAAATGGAGAGAGTTTTCGGGTTTCCCGTGCACTATACCGATGTT |
| | | TCCAACATGTCCCGCCTTGCAAGACAAAGGCTTTTGGGCCGCTCTTGGTC |
| | | TGTGCCAGTGATCCGGCACTTGTTTGCTCCCCTCAAAGAGTACTTCGCTTG |
| | | CGTCAGTTCCGGAAATTCAAACGCTAACTCTCGGGGTCCATCTTTCTCCAG |
| | | TGGTCTCGTGCCACTGTCTCTCCGGGGCTCTCACAATCCCCTGGAGATGTT |
| | | TGAGACAGTGCCAGTCTGGCGGAGGCAGCCCGTTCGCGTTCTCTCTCTGT |
| | | TCGAAGATATTAAAAAGGAACTCACCTCCCTTGGGTTCCTGGAGAGCGG |
| | | GAGCGACCCCGGACAGCTTAAGCACGTGGTCGACGTGACTGACACCGTC |
| | | CGCAAAGACGTGGAGGAATGGGGCCCCTTCGATCTGGTCTATGGGGCAA |
| | | CCCCTCCCCTTGGGCATACATGTGATCGGCCTCCATCCTGGTACCTGTTCC |
| | | AGTTTCACAGACTCCTGCAGTATGCCAGGCCAAAGCCAGGGAGCCCAAG |
| | | GCCCTTTTTCTGGATGTTCGTCGACAACCTGGTCCTGAACAAAGAAGATC |
| | | TCGACGTTGCTAGTCGCTTTCTCGAAATGGAGCCCGTGACCATTCCCGAC |
| | | GTGCATGGCGGTTCCCTCCAGAATGCAGTCAGGGTTTGGAGCAATATCCC |
| | | TGCCATCAGGTCAAGGCACTGGGCACTGGTTTCAGAGGAAGAGCTGTCC |
| | | CTCCTTGCCCAGAACAAGCAGTCATCCAAACTGGCAGCCAAGTGGCCAAC |
| | | TAAGCTGGTCAAGAACTGCTTTCTTCCCCTCAGAGAATATTTTAAGTATTT |
| | | CAGTACTGAACTGACTAGCAGTCTGGGAGGGCCGAGCTCTGGCGCACCC |
| | | CCACCAAGTGGAGGGTCTCCTGCCGGGTCCCCAACATCTACTGAAGAAG |
| | | GCACCAGCGAATCCGCAACGCCCGAGTCAGGCCCTGGTACCTCCACAGA |
| | | ACCATCTGAAGGTAGTGCGCCTGGTTCCCCAGCTGGAAGCCCTACTTCCA |
| | | CCGAAGAAGGCACGTCAACCGAACCAAGTGAAGGATCTGCCCCTGGGAC |
| | | CAGCACTGAACCATCTGAGATGGACAAGAAGTACAGCATCGGCCTGGCC |
| | | ATCGGCACCAACTCTGTGGGCTGGGCCGTGATCACCGACGAGTACAAGG |
| | | TGCCCAGCAAGAAATTCAAGGTGCTGGGCAACACCGACCGGCACAGCAT |
| | | CAAGAAGAACCTGATCGGCGCCCTGCTGTTCGACAGCGGAGAAACAGCC |
| | | GAGGCCACCCGGCTGAAGAGAACCGCCAGAAGAAGATACACCAGACGG |
| | | AAGAACCGGATCTGCTATCTGCAAGAGATCTTCAGCAACGAGATGGCCA |
| | | AGGTGGACGACAGCTTCTTCCACAGACTGGAAGAGTCCTTCCTGGTGGA |
| | | AGAGGATAAGAAGCACGAGCGGCACCCCATCTTCGGCAACATCGTGGAC |
| | | GAGGTGGCCTACCACGAGAAGTACCCCACCATCTACCACCTGAGAAAGA |
| | | AACTGGTGGACAGCACCGACAAGGCCGACCTGCGGCTGATCTATCTGGC |
| | | CCTGGCCCACATGATCAAGTTCCGGGGCCACTTCCTGATCGAGGGCGACC |
| | | TGAACCCCGACAACAGCGACGTGGACAAGCTGTTCATCCAGCTGGTGCA |
| | | GACCTACAACCAGCTGTTCGAGGAAAACCCCATCAACGCCAGCGGCGTG |
| | | GACGCCAAGGCCATCCTGTCTGCCAGACTGAGCAAGAGCAGACGGCTGG |
| | | AAAATCTGATCGCCCAGCTGCCCGGCGAGAAGAAGAATGGCCTGTTCGG |
| | | CAACCTGATTGCCCTGAGCCTGGGCCTGACCCCCAACTTCAAGAGCAACT |
| | | TCGACCTGGCCGAGGATGCCAAACTGCAGCTGAGCAAGGACACCTACGA |
| | | CGACGACCTGGACAACCTGCTGGCCCAGATCGGCGACCAGTACGCCGAC |
| | | CTGTTTCTGGCCGCCAAGAACCTGTCCGACGCCATCCTGCTGAGCGACAT |
| | | CCTGAGAGTGAACACCGAGATCACCAAGGCCCCCCTGAGCGCCTCTATG |
| | | ATCAAGAGATACGACGAGCACCACCAGGACCTGACCCTGCTGAAAGCTC |
| | | TCGTGCGGCAGCAGCTGCCTGAGAAGTACAAAGAGATTTTCTTCGACCA |
| | | GAGCAAGAACGGCTACGCCGGCTACATCGATGGCGGAGCCAGCCAGGA |
| | | AGAGTTCTACAAGTTCATCAAGCCCATCCTGGAAAAGATGGACGGCACC |
| | | GAGGAACTGCTCGTGAAGCTGAACAGAGAGGACCTGCTGCGGAAGCAG |
| | | CGGACCTTCGACAACGGCAGCATCCCCCACCAGATCCACCTGGGAGAGC |
| | | TGCACGCCATTCTGCGGCGGCAGGAAGATTTTTACCCATTCCTGAAGGAC |
| | | AACCGGGAAAAGATCGAGAAGATCCTGACCTTCCGCATCCCCTACTACGT |
| | | GGGCCCTCTGGCCAGGGGAAACAGCAGATTCGCCTGGATGACCAGAAA |
| | | GAGCGAGGAAACCATCACCCCCTGGAACTTCGAGGAAGTGGTGGACAA |
| | | GGGCGCCAGCGCCCAGAGCTTCATCGAGCGGATGACCAACTTCGATAAG |
| | | AACCTGCCCAACGAGAAGGTGCTGCCCAAGCACAGCCTGCTGTACGAGT |
| | | ACTTCACCGTGTACAACGAGCTGACCAAAGTGAAATACGTGACCGAGGG |
| | | AATGAGAAAGCCCGCCTTCCTGAGCGGCGAGCAGAAAAAAGCCATCGTG |
| | | GACCTGCTGTTCAAGACCAACCGGAAAGTGACCGTGAAGCAGCTGAAAG |
| | | AGGACTACTTCAAGAAAATCGAGTGCTTCGACTCCGTGGAAATCTCCGGC |
| | | GTGGAAGATCGGTTCAACGCCTCCCTGGGCACATACCACGATCTGCTGAA |
| | | AATTATCAAGGACAAGGACTTCCTGGACAATGAGGAAAACGAGGACATT |
| | | CTGGAAGATATCGTGCTGACCCTGACACTGTTTGAGGACAGAGAGATGA |
| | | TCGAGGAACGGCTGAAAACCTATGCCCACCTGTTCGACGACAAAGTGAT |
| | | GAAGCAGCTGAAGCGGCGGAGATACACCGGCTGGGGCAGGCTGAGCCG |
| | | GAAGCTGATCAACGGCATCCGGGACAAGCAGTCCGGCAAGACAATCCTG |
| | | GATTTCCTGAAGTCCGACGGCTTCGCCAACAGAAACTTCATGCAGCTGAT |
| | | CCACGACGACAGCCTGACCTTTAAAGAGGACATCCAGAAAGCCCAGGTG |
| | | TCCGGCCAGGGCGATAGCCTGCACGAGCACATTGCCAATCTGGCCGGCA |
| | | GCCCCGCCATTAAGAAGGGCATCCTGCAGACAGTGAAGGTGGTGGACGA |
| | | GCTCGTGAAAGTGATGGGCCGGCACAAGCCCGAGAACATCGTGATCGAA |
| | | ATGGCCAGAGAGAACCAGACCACCCAGAAGGGACAGAAGAACAGCCGC |
| | | GAGAGAATGAAGCGGATCGAAGAGGGCATCAAAGAGCTGGGCAGCCAG |
| | | ATCCTGAAAGAACACCCCGTGGAAAACACCCAGCTGCAGAACGAGAAGC |
| | | TGTACCTGTACTACCTGCAGAATGGGCGGGATATGTACGTGGACCAGGA |
| | | ACTGGACATCAACCGGCTGTCCGACTACGATGTGGACGCTATCGTGCCTC |
| | | AGAGCTTTCTGAAGGACGACTCCATCGATAACAAAGTGCTGACTCGGAG |
| | | CGACAAGAACCGGGGCAAGAGCGACAACGTGCCCTCCGAAGAGGTCGT |
| | | GAAGAAGATGAAGAACTACTGGCGCCAGCTGCTGAATGCCAAGCTGATT |
| | | ACCCAGAGGAAGTTCGACAATCTGACCAAGGCCGAGAGAGGCGGCCTG |
| | | AGCGAACTGGATAAGGCCGGCTTCATCAAGAGACAGCTGGTGGAAACCC |
| | | GGCAGATCACAAAGCACGTGGCACAGATCCTGGACTCCCGGATGAACAC |
| | | TAAGTACGACGAGAACGACAAACTGATCCGGGAAGTGAAAGTGATCACC |
| | | CTGAAGTCCAAGCTGGTGTCCGATTTCCGGAAGGATTTCCAGTTTTACAA |
| | | AGTGCGCGAGATCAACAACTACCACCACGCCCACGACGCCTACCTGAAC |
| | | GCCGTCGTGGGAACCGCCCTGATCAAAAAGTACCCTAAGCTGGAAAGCG |
| | | AGTTCGTGTACGGCGACTACAAGGTGTACGACGTGCGGAAGATGATCGC |
| | | CAAGAGCGAGCAGGAAATCGGCAAGGCTACCGCCAAGTACTTCTTCTAC |
| | | AGCAACATCATGAACTTTTTCAAGACCGAGATTACCCTGGCCAACGGCGA |
| | | GATCCGGAAGCGGCCTCTGATCGAGACAAACGGCGAAACAGGCGAGAT |
| | | CGTGTGGGATAAGGGCCGGGACTTTGCCACCGTGCGGAAAGTGCTGTCT |
| | | ATGCCCCAAGTGAATATCGTGAAAAAGACCGAGGTGCAGACAGGCGGCT |
| | | TCAGCAAAGAGTCTATCCTGCCCAAGAGGAACAGCGACAAGCTGATCGC |
| | | CAGAAAGAAGGACTGGGACCCTAAGAAGTACGGCGGCTTCGACAGCCCC |
| | | ACCGTGGCCTATTCTGTGCTGGTGGTGGCCAAAGTGGAAAAGGGCAAGT |
| | | CCAAGAAACTGAAGAGTGTGAAAGAGCTGCTGGGGATCACCATCATGGA |
| | | AAGAAGCAGCTTCGAGAAGAATCCCATCGACTTTCTGGAAGCCAAGGGC |
| | | TACAAAGAAGTGAAAAAGGACCTGATCATCAAGCTGCCTAAGTACTCCCT |
| | | GTTCGAGCTGGAAAACGGCCGGAAGAGAATGCTGGCCTCTGCCGGCGA |
| | | ACTGCAGAAGGGAAACGAACTGGCCCTGCCCTCCAAATATGTGAACTTCC |
| | | TGTACCTGGCCAGCCACTATGAGAAGCTGAAGGGCTCCCCCGAGGATAA |
| | | TGAGCAGAAACAGCTGTTTGTGGAACAGCACAAACACTACCTGGACGAG |
| | | ATCATCGAGCAGATCAGCGAGTTCTCCAAGAGAGTGATCCTGGCCGACG |
| | | CTAATCTGGACAAGGTGCTGAGCGCCTACAACAAGCACAGAGACAAGCC |
| | | TATCAGAGAGCAGGCCGAGAATATCATCCACCTGTTTACCCTGACCAATC |
| | | TGGGAGCCCCTGCCGCCTTCAAGTACTTTGACACCACCATCGACCGGAAG |
| | | AGGTACACCAGCACCAAAGAGGTGCTGGACGCCACCCTGATCCACCAGA |
| | | GCATCACCGGCCTGTACGAGACACGGATCGACCTGTCTCAGCTGGGAGG |
| | | CGACAGCGGAAGTGAGACCCCAGGTACATCCGAATCAGCAACGCCTGAA |
| | | AGCACCGGTCGGACACTGGTGACCTTCAAGGATGTATTTGTGGACTTCAC |
| | | CAGGGAGGAGTGGAAGCTGCTGGACACTGCTCAGCAGATCGTGTACAG |
| | | AAATGTGATGCTGGAGAACTATAAGAACCTGGTTTCCTTGGGTTATCAGC |
| | | TTACTAAGCCAGATGTGATCCTCCGGTTGGAGAAGGGAGAAGAGCCCCC |
| | | AAAAAAGAAGAGAAAGGTACCGAAGAAAAAAAGAAAGGTC |
| 1740 | Fusion Protein | MNHDQEFDPPKVYPPVPAEKRKPIRVLSLFDGIATGLLVLKDLGIQVDRYIAS |
| | 2 Amino Acid | EVCEDSITVGMVRHQGKIMYVGDVRSVTQKHIQEWGPFDLVIGGSPCNDLS |
| | Sequence | IVNPARKGLYEGTGRLFFEFYRLLHDARPKEGDDRPFFWLFENVVAMGVSD |
| | 3A-3L-NLS- | KRDISRFLESNPVMIDAKEVSAAHRARYFWGNLPGMNRPLASTVNDKLELQ |
| | dCas9-NLS-KRAB | ECLEHGRIAKFSKVRTITTRSNSIKQGKDQHFPVFMNEKEDILWCTEMERVF |
| | | GFPVHYTDVSNMSRLARQRLLGRSWSVPVIRHLFAPLKEYFACVSSGNSNA |
| | | NSRGPSFSSGLVPLSLRGSHNPLEMFETVPVWRRQPVRVLSLFEDIKKELTSL |
| | | GFLESGSDPGQLKHVVDVTDTVRKDVEEWGPFDLVYGATPPLGHTCDRPPS |
| | | WYLFQFHRLLQYARPKPGSPRPFFWMFVDNLVLNKEDLDVASRFLEMEPVT |
| | | IPDVHGGSLQNAVRVWSNIPAIRSRHWALVSEEELSLLAQNKQSSKLAAKW |
| | | PTKLVKNCFLPLREYFKYFSTELTSSLGGPSSGAPPPSGGSPAGSPTSTEEGTSE |
| | | SATPESGPGTSTEPSEGSAPGSPAGSPTSTEEGTSTEPSEGSAPGTSTEPSEPK |
| | | KKRKVMDKKYSIGLAIGTNSVGWAVITDEYKVPSKKFKVLGNTDRHSIKKNLI |
| | | GALLFDSGETAEATRLKRTARRRYTRRKNRICYLQEIFSNEMAKVDDSFFHRL |
| | | EESFLVEEDKKHERHPIFGNIVDEVAYHEKYPTIYHLRKKLVDSTDKADLRLIYL |
| | | ALAHMIKFRGHFLIEGDLNPDNSDVDKLFIQLVQTYNQLFEENPINASGVDA |
| | | KAILSARLSKSRRLENLIAQLPGEKKNGLFGNLIALSLGLTPNFKSNFDLAEDAK |
| | | LQLSKDTYDDDLDNLLAQIGDQYADLFLAAKNLSDAILLSDILRVNTEITKAPLS |
| | | ASMIKRYDEHHQDLTLLKALVRQQLPEKYKEIFFDQSKNGYAGYIDGGASQE |
| | | EFYKFIKPILEKMDGTEELLVKLNREDLLRKQRTFDNGSIPHQIHLGELHAILRR |
| | | QEDFYPFLKDNREKIEKILTFRIPYYVGPLARGNSRFAWMTRKSEETITPWNF |
| | | EEVVDKGASAQSFIERMTNFDKNLPNEKVLPKHSLLYEYFTVYNELTKVKYVT |
| | | EGMRKPAFLSGEQKKAIVDLLFKTNRKVTVKQLKEDYFKKIECFDSVEISGVED |
| | | RFNASLGTYHDLLKIIKDKDFLDNEENEDILEDIVLTLTLFEDREMIEERLKTYA |
| | | HLFDDKVMKQLKRRRYTGWGRLSRKLINGIRDKQSGKTILDFLKSDGFANRN |
| | | FMQLIHDDSLTFKEDIQKAQVSGQGDSLHEHIANLAGSPAIKKGILQTVKVV |
| | | DELVKVMGRHKPENIVIEMARENQTTQKGQKNSRERMKRIEEGIKELGSQIL |
| | | KEHPVENTQLQNEKLYLYYLQNGRDMYVDQELDINRLSDYDVDAIVPQSFLK |
| | | DDSIDNKVLTRSDKNRGKSDNVPSEEVVKKMKNYWRQLLNAKLITQRKFDN |
| | | LTKAERGGLSELDKAGFIKRQLVETRQITKHVAQILDSRMNTKYDENDKLIRE |
| | | VKVITLKSKLVSDFRKDFQFYKVREINNYHHAHDAYLNAVVGTALIKKYPKLES |
| | | EFVYGDYKVYDVRKMIAKSEQEIGKATAKYFFYSNIMNFFKTEITLANGEIRKR |
| | | PLIETNGETGEIVWDKGRDFATVRKVLSMPQVNIVKKTEVQTGGFSKESILPK |
| | | RNSDKLIARKKDWDPKKYGGFDSPTVAYSVLVVAKVEKGKSKKLKSVKELLGI |
| | | TIMERSSFEKNPIDFLEAKGYKEVKKDLIIKLPKYSLFELENGRKRMLASAGELQ |
| | | KGNELALPSKYVNFLYLASHYEKLKGSPEDNEQKQLFVEQHKHYLDEIIEQISE |
| | | FSKRVILADANLDKVLSAYNKHRDKPIREQAENIIHLFTLTNLGAPAAFKYFDT |
| | | TIDRKRYTSTKEVLDATLIHQSITGLYETRIDLSQLGGDPKKKRKVSGSETPGTS |
| | | ESATPESTGRTLVTFKDVFVDFTREEWKLLDTAQQIVYRNVMLENYKNLVSL |
| | | GYQLTKPDVILRLEKGEEP |
| 1741 | Fusion Protein | ATGAACCACGACCAGGAATTTGACCCTCCAAAGGTTTACCCACCTGTCCC |
| | 2 DNA Sequence | AGCTGAGAAGAGGAAGCCCATCCGGGTGCTGTCTCTCTTTGATGGAATC |
| | | GCTACAGGGCTCCTGGTGCTGAAGGACTTGGGCATTCAGGTGGACCGCT |
| | | ACATTGCCTCGGAGGTGTGTGAGGACTCCATCACGGTGGGCATGGTGCG |
| | | GCACCAGGGGAAGATCATGTACGTCGGGGACGTCCGCAGCGTCACACAG |
| | | AAGCATATCCAGGAGTGGGGCCCATTCGATCTGGTGATTGGGGGCAGTC |
| | | CCTGCAATGACCTCTCCATCGTCAACCCTGCTCGCAAGGGCCTCTACGAG |
| | | GGCACTGGCCGGCTCTTCTTTGAGTTCTACCGCCTCCTGCATGATGCGCG |
| | | GCCCAAGGAGGGAGATGATCGCCCCTTCTTCTGGCTCTTTGAGAATGTGG |
| | | TGGCCATGGGCGTTAGTGACAAGAGGGACATCTCGCGATTTCTCGAGTC |
| | | CAACCCTGTGATGATTGATGCCAAAGAAGTGTCAGCTGCACACAGGGCC |
| | | CGCTACTTCTGGGGTAACCTTCCCGGTATGAACAGGCCGTTGGCATCCAC |
| | | TGTGAATGATAAGCTGGAGCTGCAGGAGTGTCTGGAGCATGGCAGGAT |
| | | AGCCAAGTTCAGCAAAGTGAGGACCATTACTACGAGGTCAAACTCCATA |
| | | AAGCAGGGCAAAGACCAGCATTTTCCTGTCTTCATGAATGAGAAAGAGG |
| | | ACATCTTATGGTGCACTGAAATGGAAAGGGTATTTGGTTTCCCAGTCCAC |
| | | TATACTGACGTCTCCAACATGAGCCGCTTGGCGAGGCAGAGACTGCTGG |
| | | GCCGGTCATGGAGCGTGCCAGTCATCCGCCACCTCTTCGCTCCGCTGAAG |
| | | GAGTATTTTGCGTGTGTGTCTAGCGGCAATAGTAACGCTAACAGCCGCG |
| | | GGCCGAGCTTCAGCAGCGGCCTGGTGCCGTTAAGCTTGCGCGGCAGCCA |
| | | TAATCCCCTTGAGATGTTCGAAACCGTGCCTGTGTGGAGGAGACAGCCA |
| | | GTCCGGGTGCTGTCCCTTTTTGAAGACATCAAGAAAGAGCTGACGAGTTT |
| | | GGGCTTTTTGGAAAGTGGTTCTGACCCGGGACAACTGAAGCATGTGGTT |
| | | GATGTCACAGACACAGTGAGGAAGGATGTGGAGGAGTGGGGACCCTTC |
| | | GATCTTGTGTACGGCGCCACACCTCCCCTGGGCCACACCTGTGACCGTCC |
| | | TCCCAGCTGGTACCTGTTCCAGTTCCACCGGCTCCTGCAGTACGCACGGC |
| | | CCAAGCCAGGCAGCCCCAGGCCCTTCTTCTGGATGTTCGTGGACAATCTG |
| | | GTGCTGAACAAGGAAGACCTGGACGTCGCATCTCGCTTCCTGGAGATGG |
| | | AGCCAGTCACCATCCCAGATGTCCACGGCGGATCCTTGCAGAATGCTGTC |
| | | CGCGTGTGGAGCAACATCCCAGCCATAAGGAGCAGGCACTGGGCTCTGG |
| | | TTTCGGAAGAAGAATTGTCCCTGCTGGCCCAGAACAAGCAGAGCTCGAA |
| | | GCTCGCGGCCAAGTGGCCCACCAAGCTGGTGAAGAACTGCTTTCTCCCCC |
| | | TAAGAGAATATTTCAAGTATTTTTCAACAGAACTCACTTCCTCTTTAGGAG |
| | | GGCCGAGCTCTGGCGCACCCCCACCAAGTGGAGGGTCTCCTGCCGGGTC |
| | | CCCAACATCTACTGAAGAAGGCACCAGCGAATCCGCAACGCCCGAGTCA |
| | | GGCCCTGGTACCTCCACAGAACCATCTGAAGGTAGTGCGCCTGGTTCCCC |
| | | AGCTGGAAGCCCTACTTCCACCGAAGAAGGCACGTCAACCGAACCAAGT |
| | | GAAGGATCTGCCCCTGGGACCAGCACTGAACCATCTGAGCCAAAAAAGA |
| | | AGAGAAAGGTAATGGACAAGAAGTACAGCATCGGCCTGGCCATCGGCA |
| | | CCAACTCTGTGGGCTGGGCCGTGATCACCGACGAGTACAAGGTGCCCAG |
| | | CAAGAAATTCAAGGTGCTGGGCAACACCGACCGGCACAGCATCAAGAAG |
| | | AACCTGATCGGCGCCCTGCTGTTCGACAGCGGAGAAACAGCCGAGGCCA |
| | | CCCGGCTGAAGAGAACCGCCAGAAGAAGATACACCAGACGGAAGAACC |
| | | GGATCTGCTATCTGCAAGAGATCTTCAGCAACGAGATGGCCAAGGTGGA |
| | | CGACAGCTTCTTCCACAGACTGGAAGAGTCCTTCCTGGTGGAAGAGGAT |
| | | AAGAAGCACGAGCGGCACCCCATCTTCGGCAACATCGTGGACGAGGTGG |
| | | CCTACCACGAGAAGTACCCCACCATCTACCACCTGAGAAAGAAACTGGTG |
| | | GACAGCACCGACAAGGCCGACCTGCGGCTGATCTATCTGGCCCTGGCCC |
| | | ACATGATCAAGTTCCGGGGCCACTTCCTGATCGAGGGCGACCTGAACCCC |
| | | GACAACAGCGACGTGGACAAGCTGTTCATCCAGCTGGTGCAGACCTACA |
| | | ACCAGCTGTTCGAGGAAAACCCCATCAACGCCAGCGGCGTGGACGCCAA |
| | | GGCCATCCTGTCTGCCAGACTGAGCAAGAGCAGACGGCTGGAAAATCTG |
| | | ATCGCCCAGCTGCCCGGCGAGAAGAAGAATGGCCTGTTCGGCAACCTGA |
| | | TTGCCCTGAGCCTGGGCCTGACCCCCAACTTCAAGAGCAACTTCGACCTG |
| | | GCCGAGGATGCCAAACTGCAGCTGAGCAAGGACACCTACGACGACGACC |
| | | TGGACAACCTGCTGGCCCAGATCGGCGACCAGTACGCCGACCTGTTTCTG |
| | | GCCGCCAAGAACCTGTCCGACGCCATCCTGCTGAGCGACATCCTGAGAGT |
| | | GAACACCGAGATCACCAAGGCCCCCCTGAGCGCCTCTATGATCAAGAGA |
| | | TACGACGAGCACCACCAGGACCTGACCCTGCTGAAAGCTCTCGTGCGGC |
| | | AGCAGCTGCCTGAGAAGTACAAAGAGATTTTCTTCGACCAGAGCAAGAA |
| | | CGGCTACGCCGGCTACATCGATGGCGGAGCCAGCCAGGAAGAGTTCTAC |
| | | AAGTTCATCAAGCCCATCCTGGAAAAGATGGACGGCACCGAGGAACTGC |
| | | TCGTGAAGCTGAACAGAGAGGACCTGCTGCGGAAGCAGCGGACCTTCGA |
| | | CAACGGCAGCATCCCCCACCAGATCCACCTGGGAGAGCTGCACGCCATTC |
| | | TGCGGCGGCAGGAAGATTTTTACCCATTCCTGAAGGACAACCGGGAAAA |
| | | GATCGAGAAGATCCTGACCTTCCGCATCCCCTACTACGTGGGCCCTCTGG |
| | | CCAGGGGAAACAGCAGATTCGCCTGGATGACCAGAAAGAGCGAGGAAA |
| | | CCATCACCCCCTGGAACTTCGAGGAAGTGGTGGACAAGGGCGCCAGCGC |
| | | CCAGAGCTTCATCGAGCGGATGACCAACTTCGATAAGAACCTGCCCAACG |
| | | AGAAGGTGCTGCCCAAGCACAGCCTGCTGTACGAGTACTTCACCGTGTAC |
| | | AACGAGCTGACCAAAGTGAAATACGTGACCGAGGGAATGAGAAAGCCC |
| | | GCCTTCCTGAGCGGCGAGCAGAAAAAAGCCATCGTGGACCTGCTGTTCA |
| | | AGACCAACCGGAAAGTGACCGTGAAGCAGCTGAAAGAGGACTACTTCAA |
| | | GAAAATCGAGTGCTTCGACTCCGTGGAAATCTCCGGCGTGGAAGATCGG |
| | | TTCAACGCCTCCCTGGGCACATACCACGATCTGCTGAAAATTATCAAGGA |
| | | CAAGGACTTCCTGGACAATGAGGAAAACGAGGACATTCTGGAAGATATC |
| | | GTGCTGACCCTGACACTGTTTGAGGACAGAGAGATGATCGAGGAACGGC |
| | | TGAAAACCTATGCCCACCTGTTCGACGACAAAGTGATGAAGCAGCTGAA |
| | | GCGGCGGAGATACACCGGCTGGGGCAGGCTGAGCCGGAAGCTGATCAA |
| | | CGGCATCCGGGACAAGCAGTCCGGCAAGACAATCCTGGATTTCCTGAAG |
| | | TCCGACGGCTTCGCCAACAGAAACTTCATGCAGCTGATCCACGACGACAG |
| | | CCTGACCTTTAAAGAGGACATCCAGAAAGCCCAGGTGTCCGGCCAGGGC |
| | | GATAGCCTGCACGAGCACATTGCCAATCTGGCCGGCAGCCCCGCCATTAA |
| | | GAAGGGCATCCTGCAGACAGTGAAGGTGGTGGACGAGCTCGTGAAAGT |
| | | GATGGGCCGGCACAAGCCCGAGAACATCGTGATCGAAATGGCCAGAGA |
| | | GAACCAGACCACCCAGAAGGGACAGAAGAACAGCCGCGAGAGAATGAA |
| | | GCGGATCGAAGAGGGCATCAAAGAGCTGGGCAGCCAGATCCTGAAAGA |
| | | ACACCCCGTGGAAAACACCCAGCTGCAGAACGAGAAGCTGTACCTGTAC |
| | | TACCTGCAGAATGGGCGGGATATGTACGTGGACCAGGAACTGGACATCA |
| | | ACCGGCTGTCCGACTACGATGTGGACGCTATCGTGCCTCAGAGCTTTCTG |
| | | AAGGACGACTCCATCGATAACAAAGTGCTGACTCGGAGCGACAAGAACC |
| | | GGGGCAAGAGCGACAACGTGCCCTCCGAAGAGGTCGTGAAGAAGATGA |
| | | AGAACTACTGGCGCCAGCTGCTGAATGCCAAGCTGATTACCCAGAGGAA |
| | | GTTCGACAATCTGACCAAGGCCGAGAGAGGCGGCCTGAGCGAACTGGAT |
| | | AAGGCCGGCTTCATCAAGAGACAGCTGGTGGAAACCCGGCAGATCACAA |
| | | AGCACGTGGCACAGATCCTGGACTCCCGGATGAACACTAAGTACGACGA |
| | | GAACGACAAACTGATCCGGGAAGTGAAAGTGATCACCCTGAAGTCCAAG |
| | | CTGGTGTCCGATTTCCGGAAGGATTTCCAGTTTTACAAAGTGCGCGAGAT |
| | | CAACAACTACCACCACGCCCACGACGCCTACCTGAACGCCGTCGTGGGAA |
| | | CCGCCCTGATCAAAAAGTACCCTAAGCTGGAAAGCGAGTTCGTGTACGG |
| | | CGACTACAAGGTGTACGACGTGCGGAAGATGATCGCCAAGAGCGAGCA |
| | | GGAAATCGGCAAGGCTACCGCCAAGTACTTCTTCTACAGCAACATCATGA |
| | | ACTTTTTCAAGACCGAGATTACCCTGGCCAACGGCGAGATCCGGAAGCG |
| | | GCCTCTGATCGAGACAAACGGCGAAACAGGCGAGATCGTGTGGGATAA |
| | | GGGCCGGGACTTTGCCACCGTGCGGAAAGTGCTGTCTATGCCCCAAGTG |
| | | AATATCGTGAAAAAGACCGAGGTGCAGACAGGCGGCTTCAGCAAAGAG |
| | | TCTATCCTGCCCAAGAGGAACAGCGACAAGCTGATCGCCAGAAAGAAGG |
| | | ACTGGGACCCTAAGAAGTACGGCGGCTTCGACAGCCCCACCGTGGCCTA |
| | | TTCTGTGCTGGTGGTGGCCAAAGTGGAAAAGGGCAAGTCCAAGAAACTG |
| | | AAGAGTGTGAAAGAGCTGCTGGGGATCACCATCATGGAAAGAAGCAGC |
| | | TTCGAGAAGAATCCCATCGACTTTCTGGAAGCCAAGGGCTACAAAGAAG |
| | | TGAAAAAGGACCTGATCATCAAGCTGCCTAAGTACTCCCTGTTCGAGCTG |
| | | GAAAACGGCCGGAAGAGAATGCTGGCCTCTGCCGGCGAACTGCAGAAG |
| | | GGAAACGAACTGGCCCTGCCCTCCAAATATGTGAACTTCCTGTACCTGGC |
| | | CAGCCACTATGAGAAGCTGAAGGGCTCCCCCGAGGATAATGAGCAGAAA |
| | | CAGCTGTTTGTGGAACAGCACAAACACTACCTGGACGAGATCATCGAGC |
| | | AGATCAGCGAGTTCTCCAAGAGAGTGATCCTGGCCGACGCTAATCTGGA |
| | | CAAGGTGCTGAGCGCCTACAACAAGCACAGAGACAAGCCTATCAGAGAG |
| | | CAGGCCGAGAATATCATCCACCTGTTTACCCTGACCAATCTGGGAGCCCC |
| | | TGCCGCCTTCAAGTACTTTGACACCACCATCGACCGGAAGAGGTACACCA |
| | | GCACCAAAGAGGTGCTGGACGCCACCCTGATCCACCAGAGCATCACCGG |
| | | CCTGTACGAGACACGGATCGACCTGTCTCAGCTGGGAGGCGACCCAAAA |
| | | AAGAAGAGAAAGGTAAGCGGAAGTGAGACCCCAGGTACATCCGAATCA |
| | | GCAACGCCTGAAAGCACCGGTCGGACACTGGTGACCTTCAAGGATGTAT |
| | | TTGTGGACTTCACCAGGGAGGAGTGGAAGCTGCTGGACACTGCTCAGCA |
| | | GATCGTGTACAGAAATGTGATGCTGGAGAACTATAAGAACCTGGTTTCCT |
| | | TGGGTTATCAGCTTACTAAGCCAGATGTGATCCTCCGGTTGGAGAAGGG |
| | | AGAAGAGCCC |
| 1742 | Fusion Protein | MNHDQEFDPPKVYPPVPAEKRKPIRVLSLFDGIATGLLVLKDLGIQVDRYIAS |
| | 3 Amino Acid | EVCEDSITVGMVRHQGKIMYVGDVRSVTQKHIQEWGPFDLVIGGSPCNDLS |
| | Sequence | IVNPARKGLYEGTGRLFFEFYRLLHDARPKEGDDRPFFWLFENVVAMGVSD |
| | 3A-ADD-hm 3L- | KRDISRFLESNPVMIDAKEVSAAHRARYFWGNLPGMNRPLASTVNDKLELQ |
| | NLS-dCas9-NLS- | ECLEHGRIAKFSKVRTITTRSNSIKQGKDQHFPVFMNEKEDILWCTEMERVF |
| | KRAB | GFPVHYTDVSNMSRLARQRLLGRSWSVPVIRHLFAPLKEYFACVSSGNSNA |
| | | NSRGPSFSSGLVPLSLRGSHMEVKVNRRSIEDICLCCGTLQVYTRHPLFEGGL |
| | | CAPCKDKFLESLFLYDDDGHQSYCTICCSGGTLFICESPDCTRCYCFECVDILV |
| | | GPGTSERINAMACWVCFLCLPFSRSGLLQRRKRWRHQLKAFHDQEGAGP |
| | | MEIYKTVSAWKRQPVRVLSLFRNIDKVLKSLGFLESGSGSGGGTLKYVEDVTN |
| | | VVRRDVEKWGPFDLVYGSTQPLGSSCDRCPGWYMFQFHRILQYALPRQES |
| | | QRPFFWIFMDNLLLTEDDQETTTRFLQTEAVTLQDVRGRDYQNAMRVWS |
| | | NIPGLKSKHAPLTPKEEEYLQAQVRSRSKLDAPKVDLLVKNCLLPLREYFKYFS |
| | | QNSLPLGGPSSGAPPPSGGSPAGSPTSTEEGTSESATPESGPGTSTEPSEGSA |
| | | PGSPAGSPTSTEEGTSTEPSEGSAPGTSTEPSEPKKKRKVMDKKYSIGLAIGTN |
| | | SVGWAVITDEYKVPSKKFKVLGNTDRHSIKKNLIGALLFDSGETAEATRLKRT |
| | | ARRRYTRRKNRICYLQEIFSNEMAKVDDSFFHRLEESFLVEEDKKHERHPIFG |
| | | NIVDEVAYHEKYPTIYHLRKKLVDSTDKADLRLIYLALAHMIKFRGHFLIEGDL |
| | | NPDNSDVDKLFIQLVQTYNQLFEENPINASGVDAKAILSARLSKSRRLENLIA |
| | | QLPGEKKNGLFGNLIALSLGLTPNFKSNFDLAEDAKLQLSKDTYDDDLDNLLA |
| | | QIGDQYADLFLAAKNLSDAILLSDILRVNTEITKAPLSASMIKRYDEHHQDLTL |
| | | LKALVRQQLPEKYKEIFFDQSKNGYAGYIDGGASQEEFYKFIKPILEKMDGTEE |
| | | LLVKLNREDLLRKQRTFDNGSIPHQIHLGELHAILRRQEDFYPFLKDNREKIEKI |
| | | LTFRIPYYVGPLARGNSRFAWMTRKSEETITPWNFEEVVDKGASAQSFIERM |
| | | TNFDKNLPNEKVLPKHSLLYEYFTVYNELTKVKYVTEGMRKPAFLSGEQKKAI |
| | | VDLLFKTNRKVTVKQLKEDYFKKIECFDSVEISGVEDRFNASLGTYHDLLKIIKD |
| | | KDFLDNEENEDILEDIVLTLTLFEDREMIEERLKTYAHLFDDKVMKQLKRRRYT |
| | | GWGRLSRKLINGIRDKQSGKTILDFLKSDGFANRNFMQLIHDDSLTFKEDIQK |
| | | AQVSGQGDSLHEHIANLAGSPAIKKGILQTVKVVDELVKVMGRHKPENIVIE |
| | | MARENQTTQKGQKNSRERMKRIEEGIKELGSQILKEHPVENTQLQNEKLYLY |
| | | YLQNGRDMYVDQELDINRLSDYDVDAIVPQSFLKDDSIDNKVLTRSDKNRG |
| | | KSDNVPSEEVVKKMKNYWRQLLNAKLITQRKFDNLTKAERGGLSELDKAGFI |
| | | KRQLVETRQITKHVAQILDSRMNTKYDENDKLIREVKVITLKSKLVSDFRKDF |
| | | QFYKVREINNYHHAHDAYLNAVVGTALIKKYPKLESEFVYGDYKVYDVRKMI |
| | | AKSEQEIGKATAKYFFYSNIMNFFKTEITLANGEIRKRPLIETNGETGEIVWDK |
| | | GRDFATVRKVLSMPQVNIVKKTEVQTGGFSKESILPKRNSDKLIARKKDWDP |
| | | KKYGGFDSPTVAYSVLVVAKVEKGKSKKLKSVKELLGITIMERSSFEKNPIDFLE |
| | | AKGYKEVKKDLIIKLPKYSLFELENGRKRMLASAGELQKGNELALPSKYVNFLY |
| | | LASHYEKLKGSPEDNEQKQLFVEQHKHYLDEIIEQISEFSKRVILADANLDKVL |
| | | SAYNKHRDKPIREQAENIIHLFTLTNLGAPAAFKYFDTTIDRKRYTSTKEVLDA |
| | | TLIHQSITGLYETRIDLSQLGGDPKKKRKVSGSETPGTSESATPESTGRTLVTFK |
| | | DVFVDFTREEWKLLDTAQQIVYRNVMLENYKNLVSLGYQLTKPDVILRLEKG |
| | | EEP |
| 1743 | Fusion Protein | ATGAACCATGACCAGGAATTTGACCCCCCAAAGGTTTACCCACCTGTGCC |
| | 3 DNA Sequence | AGCTGAGAAGAGGAAGCCCATCCGCGTGCTGTCTCTCTTTGATGGGATT |
| | | GCTACAGGGCTCCTGGTGCTGAAGGACCTGGGCATCCAAGTGGACCGCT |
| | | ACATTGCCTCCGAGGTGTGTGAGGACTCCATCACGGTGGGCATGGTGCG |
| | | GCACCAGGGAAAGATCATGTACGTCGGGGACGTCCGCAGCGTCACACAG |
| | | AAGCATATCCAGGAGTGGGGCCCATTCGACCTGGTGATTGGAGGCAGTC |
| | | CCTGCAATGACCTCTCCATTGTCAACCCTGCCCGCAAGGGACTTTATGAG |
| | | GGTACTGGCCGCCTCTTCTTTGAGTTCTACCGCCTCCTGCATGATGCGCG |
| | | GCCCAAGGAGGGAGATGATCGCCCCTTCTTCTGGCTCTTTGAGAATGTGG |
| | | TGGCCATGGGCGTTAGTGACAAGAGGGACATCTCGCGATTTCTTGAGTCT |
| | | AACCCCGTGATGATTGACGCCAAAGAAGTGTCTGCTGCACACAGGGCCC |
| | | GTTACTTCTGGGGTAACCTTCCTGGCATGAACAGGCCTTTGGCATCCACT |
| | | GTGAATGATAAGCTGGAGCTGCAAGAGTGTCTGGAGCACGGCAGAATA |
| | | GCCAAGTTCAGCAAAGTGAGGACCATTACCACCAGGTCAAACTCTATAAA |
| | | GCAGGGCAAAGACCAGCATTTCCCCGTCTTCATGAACGAGAAGGAGGAC |
| | | ATCCTGTGGTGCACTGAAATGGAAAGGGTGTTTGGCTTCCCCGTCCACTA |
| | | CACAGACGTCTCCAACATGAGCCGCTTGGCGAGGCAGAGACTGCTGGGC |
| | | CGATCGTGGAGCGTGCCGGTCATCCGCCACCTCTTCGCTCCGCTGAAGGA |
| | | ATATTTTGCTTGTGTGTCTAGCGGCAATAGTAACGCTAACAGCCGCGGGC |
| | | CGAGCTTCAGCAGCGGCCTGGTGCCGTTAAGCTTGCGCGGCAGCCATAT |
| | | GGAAGTCAAAGTGAACCGACGGAGCATTGAAGACATCTGCCTCTGCTGT |
| | | GGAACTCTCCAGGTGTACACTCGGCACCCCTTGTTTGAGGGAGGGTTATG |
| | | TGCCCCATGTAAGGATAAGTTCCTGGAGTCCCTCTTCCTGTATGATGATG |
| | | ATGGACACCAGAGTTACTGCACCATCTGCTGTTCCGGGGGTACCCTGTTC |
| | | ATCTGTGAGAGCCCCGACTGTACCAGATGCTACTGTTTCGAGTGTGTGGA |
| | | CATCCTGGTGGGCCCCGGGACCTCAGAGAGGATCAATGCCATGGCCTGC |
| | | TGGGTTTGCTTCCTGTGCCTGCCCTTCTCACGGAGTGGACTGCTGCAGAG |
| | | GCGCAAGAGGTGGCGGCACCAGCTGAAGGCCTTCCATGATCAAGAGGG |
| | | AGCGGGCCCTATGGAGATATACAAGACAGTGTCTGCATGGAAGAGACAG |
| | | CCAGTGCGGGTACTGAGCCTCTTCAGAAACATCGACAAGGTACTAAAGA |
| | | GTTTGGGCTTCTTGGAAAGCGGTTCTGGTTCTGGGGGAGGAACGCTGAA |
| | | GTACGTGGAAGATGTCACAAATGTCGTGAGGAGAGACGTGGAGAAATG |
| | | GGGCCCCTTTGACCTGGTGTACGGCTCGACGCAGCCCCTAGGCAGCTCTT |
| | | GTGATCGCTGTCCCGGCTGGTACATGTTCCAGTTCCACCGGATCCTGCAG |
| | | TATGCGCTGCCTCGCCAGGAGAGTCAGCGGCCCTTCTTCTGGATATTCAT |
| | | GGACAATCTGCTGCTGACTGAGGATGACCAAGAGACAACTACCCGCTTCC |
| | | TTCAGACAGAGGCTGTGACCCTCCAGGATGTCCGTGGCAGAGACTACCA |
| | | GAATGCTATGCGGGTGTGGAGCAACATTCCAGGGCTGAAGAGCAAGCAT |
| | | GCGCCCCTGACCCCAAAGGAAGAAGAGTATCTGCAAGCCCAAGTCAGAA |
| | | GCAGGAGCAAGCTGGACGCCCCGAAAGTTGACCTCCTGGTGAAGAACTG |
| | | CCTTCTCCCGCTGAGAGAGTACTTCAAGTATTTTTCTCAAAACTCACTTCCT |
| | | CTTGGAGGGCCGAGCTCTGGCGCACCCCCACCAAGTGGAGGGTCTCCTG |
| | | CCGGGTCCCCAACATCTACTGAAGAAGGCACCAGCGAATCCGCAACGCC |
| | | CGAGTCAGGCCCTGGTACCTCCACAGAACCATCTGAAGGTAGTGCGCCT |
| | | GGTTCCCCAGCTGGAAGCCCTACTTCCACCGAAGAAGGCACGTCAACCG |
| | | AACCAAGTGAAGGATCTGCCCCTGGGACCAGCACTGAACCATCTGAGCC |
| | | AAAAAAGAAGAGAAAGGTAATGGACAAGAAGTACAGCATCGGCCTGGC |
| | | CATCGGCACCAACTCTGTGGGCTGGGCCGTGATCACCGACGAGTACAAG |
| | | GTGCCCAGCAAGAAATTCAAGGTGCTGGGCAACACCGACCGGCACAGCA |
| | | TCAAGAAGAACCTGATCGGCGCCCTGCTGTTCGACAGCGGAGAAACAGC |
| | | CGAGGCCACCCGGCTGAAGAGAACCGCCAGAAGAAGATACACCAGACG |
| | | GAAGAACCGGATCTGCTATCTGCAAGAGATCTTCAGCAACGAGATGGCC |
| | | AAGGTGGACGACAGCTTCTTCCACAGACTGGAAGAGTCCTTCCTGGTGG |
| | | AAGAGGATAAGAAGCACGAGCGGCACCCCATCTTCGGCAACATCGTGGA |
| | | CGAGGTGGCCTACCACGAGAAGTACCCCACCATCTACCACCTGAGAAAG |
| | | AAACTGGTGGACAGCACCGACAAGGCCGACCTGCGGCTGATCTATCTGG |
| | | CCCTGGCCCACATGATCAAGTTCCGGGGCCACTTCCTGATCGAGGGCGAC |
| | | CTGAACCCCGACAACAGCGACGTGGACAAGCTGTTCATCCAGCTGGTGC |
| | | AGACCTACAACCAGCTGTTCGAGGAAAACCCCATCAACGCCAGCGGCGT |
| | | GGACGCCAAGGCCATCCTGTCTGCCAGACTGAGCAAGAGCAGACGGCTG |
| | | GAAAATCTGATCGCCCAGCTGCCCGGCGAGAAGAAGAATGGCCTGTTCG |
| | | GCAACCTGATTGCCCTGAGCCTGGGCCTGACCCCCAACTTCAAGAGCAAC |
| | | TTCGACCTGGCCGAGGATGCCAAACTGCAGCTGAGCAAGGACACCTACG |
| | | ACGACGACCTGGACAACCTGCTGGCCCAGATCGGCGACCAGTACGCCGA |
| | | CCTGTTTCTGGCCGCCAAGAACCTGTCCGACGCCATCCTGCTGAGCGACA |
| | | TCCTGAGAGTGAACACCGAGATCACCAAGGCCCCCCTGAGCGCCTCTATG |
| | | ATCAAGAGATACGACGAGCACCACCAGGACCTGACCCTGCTGAAAGCTC |
| | | TCGTGCGGCAGCAGCTGCCTGAGAAGTACAAAGAGATTTTCTTCGACCA |
| | | GAGCAAGAACGGCTACGCCGGCTACATCGATGGCGGAGCCAGCCAGGA |
| | | AGAGTTCTACAAGTTCATCAAGCCCATCCTGGAAAAGATGGACGGCACC |
| | | GAGGAACTGCTCGTGAAGCTGAACAGAGAGGACCTGCTGCGGAAGCAG |
| | | CGGACCTTCGACAACGGCAGCATCCCCCACCAGATCCACCTGGGAGAGC |
| | | TGCACGCCATTCTGCGGCGGCAGGAAGATTTTTACCCATTCCTGAAGGAC |
| | | AACCGGGAAAAGATCGAGAAGATCCTGACCTTCCGCATCCCCTACTACGT |
| | | GGGCCCTCTGGCCAGGGGAAACAGCAGATTCGCCTGGATGACCAGAAA |
| | | GAGCGAGGAAACCATCACCCCCTGGAACTTCGAGGAAGTGGTGGACAA |
| | | GGGCGCCAGCGCCCAGAGCTTCATCGAGCGGATGACCAACTTCGATAAG |
| | | AACCTGCCCAACGAGAAGGTGCTGCCCAAGCACAGCCTGCTGTACGAGT |
| | | ACTTCACCGTGTACAACGAGCTGACCAAAGTGAAATACGTGACCGAGGG |
| | | AATGAGAAAGCCCGCCTTCCTGAGCGGCGAGCAGAAAAAAGCCATCGTG |
| | | GACCTGCTGTTCAAGACCAACCGGAAAGTGACCGTGAAGCAGCTGAAAG |
| | | AGGACTACTTCAAGAAAATCGAGTGCTTCGACTCCGTGGAAATCTCCGGC |
| | | GTGGAAGATCGGTTCAACGCCTCCCTGGGCACATACCACGATCTGCTGAA |
| | | AATTATCAAGGACAAGGACTTCCTGGACAATGAGGAAAACGAGGACATT |
| | | CTGGAAGATATCGTGCTGACCCTGACACTGTTTGAGGACAGAGAGATGA |
| | | TCGAGGAACGGCTGAAAACCTATGCCCACCTGTTCGACGACAAAGTGAT |
| | | GAAGCAGCTGAAGCGGCGGAGATACACCGGCTGGGGCAGGCTGAGCCG |
| | | GAAGCTGATCAACGGCATCCGGGACAAGCAGTCCGGCAAGACAATCCTG |
| | | GATTTCCTGAAGTCCGACGGCTTCGCCAACAGAAACTTCATGCAGCTGAT |
| | | CCACGACGACAGCCTGACCTTTAAAGAGGACATCCAGAAAGCCCAGGTG |
| | | TCCGGCCAGGGCGATAGCCTGCACGAGCACATTGCCAATCTGGCCGGCA |
| | | GCCCCGCCATTAAGAAGGGCATCCTGCAGACAGTGAAGGTGGTGGACGA |
| | | GCTCGTGAAAGTGATGGGCCGGCACAAGCCCGAGAACATCGTGATCGAA |
| | | ATGGCCAGAGAGAACCAGACCACCCAGAAGGGACAGAAGAACAGCCGC |
| | | GAGAGAATGAAGCGGATCGAAGAGGGCATCAAAGAGCTGGGCAGCCAG |
| | | ATCCTGAAAGAACACCCCGTGGAAAACACCCAGCTGCAGAACGAGAAGC |
| | | TGTACCTGTACTACCTGCAGAATGGGCGGGATATGTACGTGGACCAGGA |
| | | ACTGGACATCAACCGGCTGTCCGACTACGATGTGGACGCTATCGTGCCTC |
| | | AGAGCTTTCTGAAGGACGACTCCATCGATAACAAAGTGCTGACTCGGAG |
| | | CGACAAGAACCGGGGCAAGAGCGACAACGTGCCCTCCGAAGAGGTCGT |
| | | GAAGAAGATGAAGAACTACTGGCGCCAGCTGCTGAATGCCAAGCTGATT |
| | | ACCCAGAGGAAGTTCGACAATCTGACCAAGGCCGAGAGAGGCGGCCTG |
| | | AGCGAACTGGATAAGGCCGGCTTCATCAAGAGACAGCTGGTGGAAACCC |
| | | GGCAGATCACAAAGCACGTGGCACAGATCCTGGACTCCCGGATGAACAC |
| | | TAAGTACGACGAGAACGACAAACTGATCCGGGAAGTGAAAGTGATCACC |
| | | CTGAAGTCCAAGCTGGTGTCCGATTTCCGGAAGGATTTCCAGTTTTACAA |
| | | AGTGCGCGAGATCAACAACTACCACCACGCCCACGACGCCTACCTGAAC |
| | | GCCGTCGTGGGAACCGCCCTGATCAAAAAGTACCCTAAGCTGGAAAGCG |
| | | AGTTCGTGTACGGCGACTACAAGGTGTACGACGTGCGGAAGATGATCGC |
| | | CAAGAGCGAGCAGGAAATCGGCAAGGCTACCGCCAAGTACTTCTTCTAC |
| | | AGCAACATCATGAACTTTTTCAAGACCGAGATTACCCTGGCCAACGGCGA |
| | | GATCCGGAAGCGGCCTCTGATCGAGACAAACGGCGAAACAGGCGAGAT |
| | | CGTGTGGGATAAGGGCCGGGACTTTGCCACCGTGCGGAAAGTGCTGTCT |
| | | ATGCCCCAAGTGAATATCGTGAAAAAGACCGAGGTGCAGACAGGCGGCT |
| | | TCAGCAAAGAGTCTATCCTGCCCAAGAGGAACAGCGACAAGCTGATCGC |
| | | CAGAAAGAAGGACTGGGACCCTAAGAAGTACGGCGGCTTCGACAGCCCC |
| | | ACCGTGGCCTATTCTGTGCTGGTGGTGGCCAAAGTGGAAAAGGGCAAGT |
| | | CCAAGAAACTGAAGAGTGTGAAAGAGCTGCTGGGGATCACCATCATGGA |
| | | AAGAAGCAGCTTCGAGAAGAATCCCATCGACTTTCTGGAAGCCAAGGGC |
| | | TACAAAGAAGTGAAAAAGGACCTGATCATCAAGCTGCCTAAGTACTCCCT |
| | | GTTCGAGCTGGAAAACGGCCGGAAGAGAATGCTGGCCTCTGCCGGCGA |
| | | ACTGCAGAAGGGAAACGAACTGGCCCTGCCCTCCAAATATGTGAACTTCC |
| | | TGTACCTGGCCAGCCACTATGAGAAGCTGAAGGGCTCCCCCGAGGATAA |
| | | TGAGCAGAAACAGCTGTTTGTGGAACAGCACAAACACTACCTGGACGAG |
| | | ATCATCGAGCAGATCAGCGAGTTCTCCAAGAGAGTGATCCTGGCCGACG |
| | | CTAATCTGGACAAGGTGCTGAGCGCCTACAACAAGCACAGAGACAAGCC |
| | | TATCAGAGAGCAGGCCGAGAATATCATCCACCTGTTTACCCTGACCAATC |
| | | TGGGAGCCCCTGCCGCCTTCAAGTACTTTGACACCACCATCGACCGGAAG |
| | | AGGTACACCAGCACCAAAGAGGTGCTGGACGCCACCCTGATCCACCAGA |
| | | GCATCACCGGCCTGTACGAGACACGGATCGACCTGTCTCAGCTGGGAGG |
| | | CGACCCAAAAAAGAAGAGAAAGGTAAGCGGAAGTGAGACCCCAGGTAC |
| | | ATCCGAATCAGCAACGCCTGAAAGCACCGGTCGGACACTGGTGACCTTC |
| | | AAGGATGTATTTGTGGACTTCACCAGGGAGGAGTGGAAGCTGCTGGACA |
| | | CTGCTCAGCAGATCGTGTACAGAAATGTGATGCTGGAGAACTATAAGAA |
| | | CCTGGTTTCCTTGGGTTATCAGCTTACTAAGCCAGATGTGATCCTCCGGTT |
| | | GGAGAAGGGAGAAGAGCCC |
| 1744 | Fusion Protein | MNHDQEFDPPKVYPPVPAEKRKPIRVLSLFDGIATGLLVLKDLGIQVDRYIAS |
| | 4 Amino Acid | EVCEDSITVGMVRHQGKIMYVGDVRSVTQKHIQEWGPFDLVIGGSPCNDLS |
| | Sequence | IVNPARKGLYEGTGRLFFEFYRLLHDARPKEGDDRPFFWLFENVVAMGVSD |
| | 3A-ADD-h3L-NLS- | KRDISRFLESNPVMIDAKEVSAAHRARYFWGNLPGMNRPLASTVNDKLELQ |
| | dCas9-NLS-KRAB | ECLEHGRIAKFSKVRTITTRSNSIKQGKDQHFPVFMNEKEDILWCTEMERVF |
| | | GFPVHYTDVSNMSRLARQRLLGRSWSVPVIRHLFAPLKEYFACVSSGNSNA |
| | | NSRGPSFSSGLVPLSLRGSHMEVKANQRNIEDICICCGSLQVHTQHPLFEGGI |
| | | CAPCKDKFLDALFLYDDDGYQSYCSICCSGETLLICGNPDCTRCYCFECVDSLV |
| | | GPGTSGKVHAMSNWVCYLCLPSSRSGLLQRRRKWRSQLKAFYDRESENPLE |
| | | MFETVPVWRRQPVRVLSLFEDIKKELTSLGFLESGSDPGQLKHVVDVTDTVR |
| | | KDVEEWGPFDLVYGATPPLGHTCDRPPSWYLFQFHRLLQYARPKPGSPRPF |
| | | FWMFVDNLVLNKEDLDVASRFLEMEPVTIPDVHGGSLQNAVRVWSNIPAIR |
| | | SRHWALVSEEELSLLAQNKQSSKLAAKWPTKLVKNCFLPLREYFKYFSTELTSS |
| | | LGGPSSGAPPPSGGSPAGSPTSTEEGTSESATPESGPGTSTEPSEGSAPGSPA |
| | | GSPTSTEEGTSTEPSEGSAPGTSTEPSEPKKKRKVMDKKYSIGLAIGTNSVGW |
| | | AVITDEYKVPSKKFKVLGNTDRHSIKKNLIGALLFDSGETAEATRLKRTARRRY |
| | | TRRKNRICYLQEIFSNEMAKVDDSFFHRLEESFLVEEDKKHERHPIFGNIVDEV |
| | | AYHEKYPTIYHLRKKLVDSTDKADLRLIYLALAHMIKFRGHFLIEGDLNPDNSD |
| | | VDKLFIQLVQTYNQLFEENPINASGVDAKAILSARLSKSRRLENLIAQLPGEKK |
| | | NGLFGNLIALSLGLTPNFKSNFDLAEDAKLQLSKDTYDDDLDNLLAQIGDQYA |
| | | DLFLAAKNLSDAILLSDILRVNTEITKAPLSASMIKRYDEHHQDLTLLKALVRQ |
| | | QLPEKYKEIFFDQSKNGYAGYIDGGASQEEFYKFIKPILEKMDGTEELLVKLNR |
| | | EDLLRKQRTFDNGSIPHQIHLGELHAILRRQEDFYPFLKDNREKIEKILTFRIPY |
| | | YVGPLARGNSRFAWMTRKSEETITPWNFEEVVDKGASAQSFIERMTNFDKNL |
| | | PNEKVLPKHSLLYEYFTVYNELTKVKYVTEGMRKPAFLSGEQKKAIVDLLFKTN |
| | | RKVTVKQLKEDYFKKIECFDSVEISGVEDRFNASLGTYHDLLKIIKDKDFLDNEE |
| | | NEDILEDIVLTLTLFEDREMIEERLKTYAHLFDDKVMKQLKRRRYTGWGRLSR |
| | | KLINGIRDKQSGKTILDFLKSDGFANRNFMQLIHDDSLTFKEDIQKAQVSGQG |
| | | DSLHEHIANLAGSPAIKKGILQTVKVVDELVKVMGRHKPENIVIEMARENQT |
| | | TQKGQKNSRERMKRIEEGIKELGSQILKEHPVENTQLQNEKLYLYYLQNGRD |
| | | MYVDQELDINRLSDYDVDAIVPQSFLKDDSIDNKVLTRSDKNRGKSDNVPSE |
| | | EVVKKMKNYWRQLLNAKLITQRKFDNLTKAERGGLSELDKAGFIKRQLVETR |
| | | QITKHVAQILDSRMNTKYDENDKLIREVKVITLKSKLVSDFRKDFQFYKVREIN |
| | | NYHHAHDAYLNAVVGTALIKKYPKLESEFVYGDYKVYDVRKMIAKSEQEIGK |
| | | ATAKYFFYSNIMNFFKTEITLANGEIRKRPLIETNGETGEIVWDKGRDFATVRK |
| | | VLSMPQVNIVKKTEVQTGGFSKESILPKRNSDKLIARKKDWDPKKYGGFDSP |
| | | TVAYSVLVVAKVEKGKSKKLKSVKELLGITIMERSSFEKNPIDFLEAKGYKEVKK |
| | | DLIIKLPKYSLFELENGRKRMLASAGELQKGNELALPSKYVNFLYLASHYEKLK |
| | | GSPEDNEQKQLFVEQHKHYLDEIIEQISEFSKRVILADANLDKVLSAYNKHRD |
| | | KPIREQAENIIHLFTLTNLGAPAAFKYFDTTIDRKRYTSTKEVLDATLIHQSITG |
| | | LYETRIDLSQLGGDPKKKRKVSGSETPGTSESATPESTGRTLVTFKDVFVDFTRE |
| | | EWKLLDTAQQIVYRNVMLENYKNLVSLGYQLTKPDVILRLEKGEEP |
| 1745 | Fusion Protein | ATGAACCATGATCAAGAATTCGACCCACCTAAAGTCTACCCACCTGTGCC |
| | 4 DNA Sequence | CGCCGAAAAAAGGAAACCCATAAGGGTGCTGTCACTCTTTGATGGCATC |
| | | GCCACTGGTCTCCTGGTTCTTAAGGATCTGGGAATTCAGGTCGATCGGTA |
| | | CATTGCTAGCGAGGTTTGTGAGGATAGTATTACAGTGGGTATGGTGCGC |
| | | CACCAGGGAAAGATCATGTATGTTGGTGACGTTAGGAGCGTCACCCAGA |
| | | AACATATCCAGGAGTGGGGACCCTTTGATTTGGTGATCGGAGGTAGTCC |
| | | CTGCAATGACCTTTCCATCGTGAATCCAGCCAGGAAAGGGCTGTATGAAG |
| | | GGACTGGTAGGCTCTTTTTCGAGTTTTATCGCCTGCTTCACGACGCTAGAC |
| | | CTAAGGAAGGTGACGATAGGCCTTTCTTTTGGCTTTTTGAGAACGTCGTG |
| | | GCAATGGGAGTCTCCGACAAAAGGGACATTTCTCGCTTTCTGGAATCTAA |
| | | CCCCGTTATGATCGATGCCAAGGAAGTTTCTGCCGCTCACAGGGCAAGGT |
| | | ACTTCTGGGGCAATCTGCCCGGAATGAATCGCCCACTGGCCAGTACCGTG |
| | | AATGACAAACTGGAGCTGCAGGAGTGCCTGGAGCACGGAAGAATCGCA |
| | | AAGTTTTCTAAAGTCAGGACCATTACCACTCGCAGTAACTCCATAAAACA |
| | | GGGTAAGGACCAGCATTTTCCCGTCTTCATGAATGAAAAGGAAGATATTC |
| | | TGTGGTGCACTGAAATGGAGAGAGTTTTCGGGTTTCCCGTGCACTATACC |
| | | GATGTTTCCAACATGTCCCGCCTTGCAAGACAAAGGCTTTTGGGCCGCTC |
| | | TTGGTCTGTGCCAGTGATCCGGCACTTGTTTGCTCCCCTCAAAGAGTACTT |
| | | CGCTTGCGTCAGTTCCGGAAATTCAAACGCTAACTCTCGGGGTCCATCTTT |
| | | CTCCAGTGGTCTCGTGCCACTGTCTCTCCGGGGCTCTCACATGGAAGTCA |
| | | AGGCTAACCAGCGAAATATAGAAGACATCTGCATCTGCTGCGGAAGTCT |
| | | CCAGGTTCACACACAGCACCCTCTGTTTGAGGGAGGGATCTGCGCCCCAT |
| | | GTAAGGACAAGTTCCTGGATGCCCTCTTCCTGTACGACGATGACGGGTAC |
| | | CAATCCTACTGCTCCATCTGCTGCTCCGGAGAGACGCTGCTCATCTGCGG |
| | | AAACCCTGATTGCACCCGATGCTACTGCTTCGAGTGTGTGGATAGCCTGG |
| | | TCGGCCCCGGGACCTCGGGGAAGGTGCACGCCATGAGCAACTGGGTGT |
| | | GCTACCTGTGCCTGCCGTCCTCCCGAAGCGGGCTGCTGCAGCGTCGGAG |
| | | GAAGTGGCGCAGCCAGCTCAAGGCCTTCTACGACCGAGAGTCGGAGAAT |
| | | CCCCTGGAGATGTTTGAGACAGTGCCAGTCTGGCGGAGGCAGCCCGTTC |
| | | GCGTTCTCTCTCTGTTCGAAGATATTAAAAAGGAACTCACCTCCCTTGGGT |
| | | TCCTGGAGAGCGGGAGCGACCCCGGACAGCTTAAGCACGTGGTCGACGT |
| | | GACTGACACCGTCCGCAAAGACGTGGAGGAATGGGGCCCCTTCGATCTG |
| | | GTCTATGGGGCAACCCCTCCCCTTGGGCATACATGTGATCGGCCTCCATC |
| | | CTGGTACCTGTTCCAGTTTCACAGACTCCTGCAGTATGCCAGGCCAAAGC |
| | | CAGGGAGCCCAAGGCCCTTTTTCTGGATGTTCGTCGACAACCTGGTCCTG |
| | | AACAAAGAAGATCTCGACGTTGCTAGTCGCTTTCTCGAAATGGAGCCCGT |
| | | GACCATTCCCGACGTGCATGGCGGTTCCCTCCAGAATGCAGTCAGGGTTT |
| | | GGAGCAATATCCCTGCCATCAGGTCAAGGCACTGGGCACTGGTTTCAGA |
| | | GGAAGAGCTGTCCCTCCTTGCCCAGAACAAGCAGTCATCCAAACTGGCA |
| | | GCCAAGTGGCCAACTAAGCTGGTCAAGAACTGCTTTCTTCCCCTCAGAGA |
| | | ATATTTTAAGTATTTCAGTACTGAACTGACTAGCAGTCTGGGAGGGCCGA |
| | | GCTCTGGCGCACCCCCACCAAGTGGAGGGTCTCCTGCCGGGTCCCCAAC |
| | | ATCTACTGAAGAAGGCACCAGCGAATCCGCAACGCCCGAGTCAGGCCCT |
| | | GGTACCTCCACAGAACCATCTGAAGGTAGTGCGCCTGGTTCCCCAGCTGG |
| | | AAGCCCTACTTCCACCGAAGAAGGCACGTCAACCGAACCAAGTGAAGGA |
| | | TCTGCCCCTGGGACCAGCACTGAACCATCTGAGCCAAAAAAGAAGAGAA |
| | | AGGTAATGGACAAGAAGTACAGCATCGGCCTGGCCATCGGCACCAACTC |
| | | TGTGGGCTGGGCCGTGATCACCGACGAGTACAAGGTGCCCAGCAAGAAA |
| | | TTCAAGGTGCTGGGCAACACCGACCGGCACAGCATCAAGAAGAACCTGA |
| | | TCGGCGCCCTGCTGTTCGACAGCGGAGAAACAGCCGAGGCCACCCGGCT |
| | | GAAGAGAACCGCCAGAAGAAGATACACCAGACGGAAGAACCGGATCTG |
| | | CTATCTGCAAGAGATCTTCAGCAACGAGATGGCCAAGGTGGACGACAGC |
| | | TTCTTCCACAGACTGGAAGAGTCCTTCCTGGTGGAAGAGGATAAGAAGC |
| | | ACGAGCGGCACCCCATCTTCGGCAACATCGTGGACGAGGTGGCCTACCA |
| | | CGAGAAGTACCCCACCATCTACCACCTGAGAAAGAAACTGGTGGACAGC |
| | | ACCGACAAGGCCGACCTGCGGCTGATCTATCTGGCCCTGGCCCACATGAT |
| | | CAAGTTCCGGGGCCACTTCCTGATCGAGGGCGACCTGAACCCCGACAAC |
| | | AGCGACGTGGACAAGCTGTTCATCCAGCTGGTGCAGACCTACAACCAGC |
| | | TGTTCGAGGAAAACCCCATCAACGCCAGCGGCGTGGACGCCAAGGCCAT |
| | | CCTGTCTGCCAGACTGAGCAAGAGCAGACGGCTGGAAAATCTGATCGCC |
| | | CAGCTGCCCGGCGAGAAGAAGAATGGCCTGTTCGGCAACCTGATTGCCC |
| | | TGAGCCTGGGCCTGACCCCCAACTTCAAGAGCAACTTCGACCTGGCCGAG |
| | | GATGCCAAACTGCAGCTGAGCAAGGACACCTACGACGACGACCTGGACA |
| | | ACCTGCTGGCCCAGATCGGCGACCAGTACGCCGACCTGTTTCTGGCCGCC |
| | | AAGAACCTGTCCGACGCCATCCTGCTGAGCGACATCCTGAGAGTGAACA |
| | | CCGAGATCACCAAGGCCCCCCTGAGCGCCTCTATGATCAAGAGATACGAC |
| | | GAGCACCACCAGGACCTGACCCTGCTGAAAGCTCTCGTGCGGCAGCAGC |
| | | TGCCTGAGAAGTACAAAGAGATTTTCTTCGACCAGAGCAAGAACGGCTA |
| | | CGCCGGCTACATCGATGGCGGAGCCAGCCAGGAAGAGTTCTACAAGTTC |
| | | ATCAAGCCCATCCTGGAAAAGATGGACGGCACCGAGGAACTGCTCGTGA |
| | | AGCTGAACAGAGAGGACCTGCTGCGGAAGCAGCGGACCTTCGACAACG |
| | | GCAGCATCCCCCACCAGATCCACCTGGGAGAGCTGCACGCCATTCTGCGG |
| | | CGGCAGGAAGATTTTTACCCATTCCTGAAGGACAACCGGGAAAAGATCG |
| | | AGAAGATCCTGACCTTCCGCATCCCCTACTACGTGGGCCCTCTGGCCAGG |
| | | GGAAACAGCAGATTCGCCTGGATGACCAGAAAGAGCGAGGAAACCATC |
| | | ACCCCCTGGAACTTCGAGGAAGTGGTGGACAAGGGCGCCAGCGCCCAG |
| | | AGCTTCATCGAGCGGATGACCAACTTCGATAAGAACCTGCCCAACGAGA |
| | | AGGTGCTGCCCAAGCACAGCCTGCTGTACGAGTACTTCACCGTGTACAAC |
| | | GAGCTGACCAAAGTGAAATACGTGACCGAGGGAATGAGAAAGCCCGCC |
| | | TTCCTGAGCGGCGAGCAGAAAAAAGCCATCGTGGACCTGCTGTTCAAGA |
| | | CCAACCGGAAAGTGACCGTGAAGCAGCTGAAAGAGGACTACTTCAAGAA |
| | | AATCGAGTGCTTCGACTCCGTGGAAATCTCCGGCGTGGAAGATCGGTTC |
| | | AACGCCTCCCTGGGCACATACCACGATCTGCTGAAAATTATCAAGGACAA |
| | | GGACTTCCTGGACAATGAGGAAAACGAGGACATTCTGGAAGATATCGTG |
| | | CTGACCCTGACACTGTTTGAGGACAGAGAGATGATCGAGGAACGGCTGA |
| | | AAACCTATGCCCACCTGTTCGACGACAAAGTGATGAAGCAGCTGAAGCG |
| | | GCGGAGATACACCGGCTGGGGCAGGCTGAGCCGGAAGCTGATCAACGG |
| | | CATCCGGGACAAGCAGTCCGGCAAGACAATCCTGGATTTCCTGAAGTCC |
| | | GACGGCTTCGCCAACAGAAACTTCATGCAGCTGATCCACGACGACAGCCT |
| | | GACCTTTAAAGAGGACATCCAGAAAGCCCAGGTGTCCGGCCAGGGCGAT |
| | | AGCCTGCACGAGCACATTGCCAATCTGGCCGGCAGCCCCGCCATTAAGA |
| | | AGGGCATCCTGCAGACAGTGAAGGTGGTGGACGAGCTCGTGAAAGTGA |
| | | TGGGCCGGCACAAGCCCGAGAACATCGTGATCGAAATGGCCAGAGAGA |
| | | ACCAGACCACCCAGAAGGGACAGAAGAACAGCCGCGAGAGAATGAAGC |
| | | GGATCGAAGAGGGCATCAAAGAGCTGGGCAGCCAGATCCTGAAAGAAC |
| | | ACCCCGTGGAAAACACCCAGCTGCAGAACGAGAAGCTGTACCTGTACTA |
| | | CCTGCAGAATGGGCGGGATATGTACGTGGACCAGGAACTGGACATCAAC |
| | | CGGCTGTCCGACTACGATGTGGACGCTATCGTGCCTCAGAGCTTTCTGAA |
| | | GGACGACTCCATCGATAACAAAGTGCTGACTCGGAGCGACAAGAACCGG |
| | | GGCAAGAGCGACAACGTGCCCTCCGAAGAGGTCGTGAAGAAGATGAAG |
| | | AACTACTGGCGCCAGCTGCTGAATGCCAAGCTGATTACCCAGAGGAAGT |
| | | TCGACAATCTGACCAAGGCCGAGAGAGGCGGCCTGAGCGAACTGGATA |
| | | AGGCCGGCTTCATCAAGAGACAGCTGGTGGAAACCCGGCAGATCACAAA |
| | | GCACGTGGCACAGATCCTGGACTCCCGGATGAACACTAAGTACGACGAG |
| | | AACGACAAACTGATCCGGGAAGTGAAAGTGATCACCCTGAAGTCCAAGC |
| | | TGGTGTCCGATTTCCGGAAGGATTTCCAGTTTTACAAAGTGCGCGAGATC |
| | | AACAACTACCACCACGCCCACGACGCCTACCTGAACGCCGTCGTGGGAAC |
| | | CGCCCTGATCAAAAAGTACCCTAAGCTGGAAAGCGAGTTCGTGTACGGC |
| | | GACTACAAGGTGTACGACGTGCGGAAGATGATCGCCAAGAGCGAGCAG |
| | | GAAATCGGCAAGGCTACCGCCAAGTACTTCTTCTACAGCAACATCATGAA |
| | | CTTTTTCAAGACCGAGATTACCCTGGCCAACGGCGAGATCCGGAAGCGG |
| | | CCTCTGATCGAGACAAACGGCGAAACAGGCGAGATCGTGTGGGATAAG |
| | | GGCCGGGACTTTGCCACCGTGCGGAAAGTGCTGTCTATGCCCCAAGTGA |
| | | ATATCGTGAAAAAGACCGAGGTGCAGACAGGCGGCTTCAGCAAAGAGTC |
| | | TATCCTGCCCAAGAGGAACAGCGACAAGCTGATCGCCAGAAAGAAGGAC |
| | | TGGGACCCTAAGAAGTACGGCGGCTTCGACAGCCCCACCGTGGCCTATT |
| | | CTGTGCTGGTGGTGGCCAAAGTGGAAAAGGGCAAGTCCAAGAAACTGA |
| | | AGAGTGTGAAAGAGCTGCTGGGGATCACCATCATGGAAAGAAGCAGCTT |
| | | CGAGAAGAATCCCATCGACTTTCTGGAAGCCAAGGGCTACAAAGAAGTG |
| | | AAAAAGGACCTGATCATCAAGCTGCCTAAGTACTCCCTGTTCGAGCTGGA |
| | | AAACGGCCGGAAGAGAATGCTGGCCTCTGCCGGCGAACTGCAGAAGGG |
| | | AAACGAACTGGCCCTGCCCTCCAAATATGTGAACTTCCTGTACCTGGCCA |
| | | GCCACTATGAGAAGCTGAAGGGCTCCCCCGAGGATAATGAGCAGAAACA |
| | | GCTGTTTGTGGAACAGCACAAACACTACCTGGACGAGATCATCGAGCAG |
| | | ATCAGCGAGTTCTCCAAGAGAGTGATCCTGGCCGACGCTAATCTGGACA |
| | | AGGTGCTGAGCGCCTACAACAAGCACAGAGACAAGCCTATCAGAGAGCA |
| | | GGCCGAGAATATCATCCACCTGTTTACCCTGACCAATCTGGGAGCCCCTG |
| | | CCGCCTTCAAGTACTTTGACACCACCATCGACCGGAAGAGGTACACCAGC |
| | | ACCAAAGAGGTGCTGGACGCCACCCTGATCCACCAGAGCATCACCGGCC |
| | | TGTACGAGACACGGATCGACCTGTCTCAGCTGGGAGGCGACCCAAAAAA |
| | | GAAGAGAAAGGTAAGCGGAAGTGAGACCCCAGGTACATCCGAATCAGC |
| | | AACGCCTGAAAGCACCGGTCGGACACTGGTGACCTTCAAGGATGTATTT |
| | | GTGGACTTCACCAGGGAGGAGTGGAAGCTGCTGGACACTGCTCAGCAGA |
| | | TCGTGTACAGAAATGTGATGCTGGAGAACTATAAGAACCTGGTTTCCTTG |
| | | GGTTATCAGCTTACTAAGCCAGATGTGATCCTCCGGTTGGAGAAGGGAG |
| | | AAGAGCCC |
| 1746 | Fusion Protein | MPKKKRKVPKKKRKVNHDQEFDPPKVYPPVPAEKRKPIRVLSLFDGIATGLLV |
| | 5 Amino Acid | LKDLGIQVDRYIASEVCEDSITVGMVRHQGKIMYVGDVRSVTQKHIQEWGP |
| | Sequence | FDLVIGGSPCNDLSIVNPARKGLYEGTGRLFFEFYRLLHDARPKEGDDRPFFW |
| | NLS-NLS-3A-3L- | LFENVVAMGVSDKRDISRFLESNPVMIDAKEVSAAHRARYFWGNLPGMNR |
| | dCas9-KRAB-NLS- | PLASTVNDKLELQECLEHGRIAKFSKVRTITTRSNSIKQGKDQHFPVFMNEKE |
| | NLS | DILWCTEMERVFGFPVHYTDVSNMSRLARQRLLGRSWSVPVIRHLFAPLKEY |
| | | FACVSSGNSNANSRGPSFSSGLVPLSLRGSHNPLEMFETVPVWRRQPVRVL |
| | | SLFEDIKKELTSLGFLESGSDPGQLKHVVDVTDTVRKDVEEWGPFDLVYGATP |
| | | PLGHTCDRPPSWYLFQFHRLLQYARPKPGSPRPFFWMFVDNLVLNKEDLDV |
| | | ASRFLEMEPVTIPDVHGGSLQNAVRVWSNIPAIRSRHWALVSEEELSLLAQN |
| | | KQSSKLAAKWPTKLVKNCFLPLREYFKYFSTELTSSLGGPSSGAPPPSGGSPA |
| | | GSPTSTEEGTSESATPESGPGTSTEPSEGSAPGSPAGSPTSTEEGTSTEPSEGS |
| | | APGTSTEPSEMDKKYSIGLAIGTNSVGWAVITDEYKVPSKKFKVLGNTDRHSI |
| | | KKNLIGALLFDSGETAEATRLKRTARRRYTRRKNRICYLQEIFSNEMAKVDDSF |
| | | FHRLEESFLVEEDKKHERHPIFGNIVDEVAYHEKYPTIYHLRKKLVDSTDKADL |
| | | RLIYLALAHMIKFRGHFLIEGDLNPDNSDVDKLFIQLVQTYNQLFEENPINASG |
| | | VDAKAILSARLSKSRRLENLIAQLPGEKKNGLFGNLIALSLGLTPNFKSNFDLAE |
| | | DAKLQLSKDTYDDDLDNLLAQIGDQYADLFLAAKNLSDAILLSDILRVNTEITK |
| | | APLSASMIKRYDEHHQDLTLLKALVRQQLPEKYKEIFFDQSKNGYAGYIDGG |
| | | ASQEEFYKFIKPILEKMDGTEELLVKLNREDLLRKQRTFDNGSIPHQIHLGELH |
| | | AILRRQEDFYPFLKDNREKIEKILTFRIPYYVGPLARGNSRFAWMTRKSEETITP |
| | | WNFEEVVDKGASAQSFIERMTNFDKNLPNEKVLPKHSLLYEYFTVYNELTKV |
| | | KYVTEGMRKPAFLSGEQKKAIVDLLFKTNRKVTVKQLKEDYFKKIECFDSVEIS |
| | | GVEDRFNASLGTYHDLLKIIKDKDFLDNEENEDILEDIVLTLTLFEDREMIEERL |
| | | KTYAHLFDDKVMKQLKRRRYTGWGRLSRKLINGIRDKQSGKTILDFLKSDGF |
| | | ANRNFMQLIHDDSLTFKEDIQKAQVSGQGDSLHEHIANLAGSPAIKKGILQT |
| | | VKVVDELVKVMGRHKPENIVIEMARENQTTQKGQKNSRERMKRIEEGIKEL |
| | | GSQILKEHPVENTQLQNEKLYLYYLQNGRDMYVDQELDINRLSDYDVDAIVP |
| | | QSFLKDDSIDNKVLTRSDKNRGKSDNVPSEEVVKKMKNYWRQLLNAKLITQ |
| | | RKFDNLTKAERGGLSELDKAGFIKRQLVETRQITKHVAQILDSRMNTKYDEN |
| | | DKLIREVKVITLKSKLVSDFRKDFQFYKVREINNYHHAHDAYLNAVVGTALIKK |
| | | YPKLESEFVYGDYKVYDVRKMIAKSEQEIGKATAKYFFYSNIMNFFKTEITLAN |
| | | GEIRKRPLIETNGETGEIVWDKGRDFATVRKVLSMPQVNIVKKTEVQTGGFS |
| | | KESILPKRNSDKLIARKKDWDPKKYGGFDSPTVAYSVLVVAKVEKGKSKKLKS |
| | | VKELLGITIMERSSFEKNPIDFLEAKGYKEVKKDLIIKLPKYSLFELENGRKRML |
| | | ASAGELQKGNELALPSKYVNFLYLASHYEKLKGSPEDNEQKQLFVEQHKHYLD |
| | | EIIEQISEFSKRVILADANLDKVLSAYNKHRDKPIREQAENIIHLFTLTNLGAPA |
| | | AFKYFDTTIDRKRYTSTKEVLDATLIHQSITGLYETRIDLSQLGGDSGSETPGTS |
| | | ESATPESTGRTLVTFKDVFVDFTREEWKLLDTAQQIVYRNVMLENYKNLVSLG |
| | | YQLTKPDVILRLEKGEEPSADYKDDDDKAPKKKRKVPKKKRKV |
| 1747 | Fusion Protein | ATGCCAAAAAAGAAGAGAAAGGTACCGAAGAAAAAAAGAAAGGTCAAC |
| | 5 DNA Sequence | CACGACCAGGAATTCGACCCTCCAAAGGTTTACCCACCTGTCCCAGCTGA |
| | | GAAGAGGAAGCCCATCCGGGTGCTGTCTCTCTTTGATGGAATCGCTACA |
| | | GGGCTCCTGGTGCTGAAGGACTTGGGCATTCAGGTGGACCGCTACATTG |
| | | CCTCGGAGGTGTGTGAGGACTCCATCACGGTGGGCATGGTGCGGCACCA |
| | | GGGGAAGATCATGTACGTCGGGGACGTCCGCAGCGTCACACAGAAGCAT |
| | | ATCCAGGAGTGGGGCCCATTCGATCTGGTGATTGGGGGCAGTCCCTGCA |
| | | ATGACCTCTCCATCGTCAACCCTGCTCGCAAGGGCCTCTACGAGGGCACT |
| | | GGCCGGCTCTTCTTTGAGTTCTACCGCCTCCTGCATGATGCGCGGCCCAA |
| | | GGAGGGAGATGATCGCCCCTTCTTCTGGCTCTTTGAGAATGTGGTGGCCA |
| | | TGGGCGTTAGTGACAAGAGGGACATCTCGCGATTTCTCGAGTCCAACCCT |
| | | GTGATGATTGATGCCAAAGAAGTGTCAGCTGCACACAGGGCCCGCTACT |
| | | TCTGGGGTAACCTTCCCGGTATGAACAGGCCGTTGGCATCCACTGTGAAT |
| | | GATAAGCTGGAGCTGCAGGAGTGTCTGGAGCATGGCAGGATAGCCAAG |
| | | TTCAGCAAAGTGAGGACCATTACTACGAGGTCAAACTCCATAAAGCAGG |
| | | GCAAAGACCAGCATTTTCCTGTCTTCATGAATGAGAAAGAGGACATCTTA |
| | | TGGTGCACTGAAATGGAAAGGGTATTTGGTTTCCCAGTCCACTATACTGA |
| | | CGTCTCCAACATGAGCCGCTTGGCGAGGCAGAGACTGCTGGGCCGGTCA |
| | | TGGAGCGTGCCAGTCATCCGCCACCTCTTCGCTCCGCTGAAGGAGTATTT |
| | | TGCGTGTGTGTCTAGCGGCAATAGTAACGCTAACAGCCGCGGGCCGAGC |
| | | TTCAGCAGCGGCCTGGTGCCGTTAAGCTTGCGCGGCAGCCATAATCCCCT |
| | | TGAGATGTTCGAAACCGTGCCTGTGTGGAGGAGACAGCCAGTCCGGGTG |
| | | CTGTCCCTTTTTGAAGACATCAAGAAAGAGCTGACGAGTTTGGGCTTTTT |
| | | GGAAAGTGGTTCTGACCCGGGACAACTGAAGCATGTGGTTGATGTCACA |
| | | GACACAGTGAGGAAGGATGTGGAGGAGTGGGGACCCTTCGATCTTGTG |
| | | TACGGCGCCACACCTCCCCTGGGCCACACCTGTGACCGTCCTCCCAGCTG |
| | | GTACCTGTTCCAGTTCCACCGGCTCCTGCAGTACGCACGGCCCAAGCCAG |
| | | GCAGCCCCAGGCCCTTCTTCTGGATGTTCGTGGACAATCTGGTGCTGAAC |
| | | AAGGAAGACCTGGACGTCGCATCTCGCTTCCTGGAGATGGAGCCAGTCA |
| | | CCATCCCAGATGTCCACGGCGGATCCTTGCAGAATGCTGTCCGCGTGTGG |
| | | AGCAACATCCCAGCCATAAGGAGCAGGCACTGGGCTCTGGTTTCGGAAG |
| | | AAGAATTGTCCCTGCTGGCCCAGAACAAGCAGAGCTCGAAGCTCGCGGC |
| | | CAAGTGGCCCACCAAGCTGGTGAAGAACTGCTTTCTCCCCCTAAGAGAAT |
| | | ATTTCAAGTATTTTTCAACAGAACTCACTTCCTCTTTAGGAGGGCCGAGCT |
| | | CTGGCGCACCCCCACCAAGTGGAGGGTCTCCTGCCGGGTCCCCAACATCT |
| | | ACTGAAGAAGGCACCAGCGAATCCGCAACGCCCGAGTCAGGCCCTGGTA |
| | | CCTCCACAGAACCATCTGAAGGTAGTGCGCCTGGTTCCCCAGCTGGAAGC |
| | | CCTACTTCCACCGAAGAAGGCACGTCAACCGAACCAAGTGAAGGATCTG |
| | | CCCCTGGGACCAGCACTGAACCATCTGAGATGGACAAGAAGTACAGCAT |
| | | CGGCCTGGCCATCGGCACCAACTCTGTGGGCTGGGCCGTGATCACCGAC |
| | | GAGTACAAGGTGCCCAGCAAGAAATTCAAGGTGCTGGGCAACACCGACC |
| | | GGCACAGCATCAAGAAGAACCTGATCGGCGCCCTGCTGTTCGACAGCGG |
| | | AGAAACAGCCGAGGCCACCCGGCTGAAGAGAACCGCCAGAAGAAGATA |
| | | CACCAGACGGAAGAACCGGATCTGCTATCTGCAAGAGATCTTCAGCAAC |
| | | GAGATGGCCAAGGTGGACGACAGCTTCTTCCACAGACTGGAAGAGTCCT |
| | | TCCTGGTGGAAGAGGATAAGAAGCACGAGCGGCACCCCATCTTCGGCAA |
| | | CATCGTGGACGAGGTGGCCTACCACGAGAAGTACCCCACCATCTACCACC |
| | | TGAGAAAGAAACTGGTGGACAGCACCGACAAGGCCGACCTGCGGCTGA |
| | | TCTATCTGGCCCTGGCCCACATGATCAAGTTCCGGGGCCACTTCCTGATC |
| | | GAGGGCGACCTGAACCCCGACAACAGCGACGTGGACAAGCTGTTCATCC |
| | | AGCTGGTGCAGACCTACAACCAGCTGTTCGAGGAAAACCCCATCAACGC |
| | | CAGCGGCGTGGACGCCAAGGCCATCCTGTCTGCCAGACTGAGCAAGAGC |
| | | AGACGGCTGGAAAATCTGATCGCCCAGCTGCCCGGCGAGAAGAAGAAT |
| | | GGCCTGTTCGGCAACCTGATTGCCCTGAGCCTGGGCCTGACCCCCAACTT |
| | | CAAGAGCAACTTCGACCTGGCCGAGGATGCCAAACTGCAGCTGAGCAAG |
| | | GACACCTACGACGACGACCTGGACAACCTGCTGGCCCAGATCGGCGACC |
| | | AGTACGCCGACCTGTTTCTGGCCGCCAAGAACCTGTCCGACGCCATCCTG |
| | | CTGAGCGACATCCTGAGAGTGAACACCGAGATCACCAAGGCCCCCCTGA |
| | | GCGCCTCTATGATCAAGAGATACGACGAGCACCACCAGGACCTGACCCT |
| | | GCTGAAAGCTCTCGTGCGGCAGCAGCTGCCTGAGAAGTACAAAGAGATT |
| | | TTCTTCGACCAGAGCAAGAACGGCTACGCCGGCTACATCGATGGCGGAG |
| | | CCAGCCAGGAAGAGTTCTACAAGTTCATCAAGCCCATCCTGGAAAAGAT |
| | | GGACGGCACCGAGGAACTGCTCGTGAAGCTGAACAGAGAGGACCTGCT |
| | | GCGGAAGCAGCGGACCTTCGACAACGGCAGCATCCCCCACCAGATCCAC |
| | | CTGGGAGAGCTGCACGCCATTCTGCGGCGGCAGGAAGATTTTTACCCATT |
| | | CCTGAAGGACAACCGGGAAAAGATCGAGAAGATCCTGACCTTCCGCATC |
| | | CCCTACTACGTGGGCCCTCTGGCCAGGGGAAACAGCAGATTCGCCTGGA |
| | | TGACCAGAAAGAGCGAGGAAACCATCACCCCCTGGAACTTCGAGGAAGT |
| | | GGTGGACAAGGGCGCCAGCGCCCAGAGCTTCATCGAGCGGATGACCAA |
| | | CTTCGATAAGAACCTGCCCAACGAGAAGGTGCTGCCCAAGCACAGCCTG |
| | | CTGTACGAGTACTTCACCGTGTACAACGAGCTGACCAAAGTGAAATACGT |
| | | GACCGAGGGAATGAGAAAGCCCGCCTTCCTGAGCGGCGAGCAGAAAAA |
| | | AGCCATCGTGGACCTGCTGTTCAAGACCAACCGGAAAGTGACCGTGAAG |
| | | CAGCTGAAAGAGGACTACTTCAAGAAAATCGAGTGCTTCGACTCCGTGG |
| | | AAATCTCCGGCGTGGAAGATCGGTTCAACGCCTCCCTGGGCACATACCAC |
| | | GATCTGCTGAAAATTATCAAGGACAAGGACTTCCTGGACAATGAGGAAA |
| | | ACGAGGACATTCTGGAAGATATCGTGCTGACCCTGACACTGTTTGAGGA |
| | | CAGAGAGATGATCGAGGAACGGCTGAAAACCTATGCCCACCTGTTCGAC |
| | | GACAAAGTGATGAAGCAGCTGAAGCGGCGGAGATACACCGGCTGGGGC |
| | | AGGCTGAGCCGGAAGCTGATCAACGGCATCCGGGACAAGCAGTCCGGC |
| | | AAGACAATCCTGGATTTCCTGAAGTCCGACGGCTTCGCCAACAGAAACTT |
| | | CATGCAGCTGATCCACGACGACAGCCTGACCTTTAAAGAGGACATCCAG |
| | | AAAGCCCAGGTGTCCGGCCAGGGCGATAGCCTGCACGAGCACATTGCCA |
| | | ATCTGGCCGGCAGCCCCGCCATTAAGAAGGGCATCCTGCAGACAGTGAA |
| | | GGTGGTGGACGAGCTCGTGAAAGTGATGGGCCGGCACAAGCCCGAGAA |
| | | CATCGTGATCGAAATGGCCAGAGAGAACCAGACCACCCAGAAGGGACA |
| | | GAAGAACAGCCGCGAGAGAATGAAGCGGATCGAAGAGGGCATCAAAGA |
| | | GCTGGGCAGCCAGATCCTGAAAGAACACCCCGTGGAAAACACCCAGCTG |
| | | CAGAACGAGAAGCTGTACCTGTACTACCTGCAGAATGGGCGGGATATGT |
| | | ACGTGGACCAGGAACTGGACATCAACCGGCTGTCCGACTACGATGTGGA |
| | | CGCTATCGTGCCTCAGAGCTTTCTGAAGGACGACTCCATCGATAACAAAG |
| | | TGCTGACTCGGAGCGACAAGAACCGGGGCAAGAGCGACAACGTGCCCTC |
| | | CGAAGAGGTCGTGAAGAAGATGAAGAACTACTGGCGCCAGCTGCTGAAT |
| | | GCCAAGCTGATTACCCAGAGGAAGTTCGACAATCTGACCAAGGCCGAGA |
| | | GAGGCGGCCTGAGCGAACTGGATAAGGCCGGCTTCATCAAGAGACAGCT |
| | | GGTGGAAACCCGGCAGATCACAAAGCACGTGGCACAGATCCTGGACTCC |
| | | CGGATGAACACTAAGTACGACGAGAACGACAAACTGATCCGGGAAGTG |
| | | AAAGTGATCACCCTGAAGTCCAAGCTGGTGTCCGATTTCCGGAAGGATTT |
| | | CCAGTTTTACAAAGTGCGCGAGATCAACAACTACCACCACGCCCACGACG |
| | | CCTACCTGAACGCCGTCGTGGGAACCGCCCTGATCAAAAAGTACCCTAAG |
| | | CTGGAAAGCGAGTTCGTGTACGGCGACTACAAGGTGTACGACGTGCGGA |
| | | AGATGATCGCCAAGAGCGAGCAGGAAATCGGCAAGGCTACCGCCAAGT |
| | | ACTTCTTCTACAGCAACATCATGAACTTTTTCAAGACCGAGATTACCCTGG |
| | | CCAACGGCGAGATCCGGAAGCGGCCTCTGATCGAGACAAACGGCGAAA |
| | | CAGGCGAGATCGTGTGGGATAAGGGCCGGGACTTTGCCACCGTGCGGA |
| | | AAGTGCTGTCTATGCCCCAAGTGAATATCGTGAAAAAGACCGAGGTGCA |
| | | GACAGGCGGCTTCAGCAAAGAGTCTATCCTGCCCAAGAGGAACAGCGAC |
| | | AAGCTGATCGCCAGAAAGAAGGACTGGGACCCTAAGAAGTACGGCGGC |
| | | TTCGACAGCCCCACCGTGGCCTATTCTGTGCTGGTGGTGGCCAAAGTGGA |
| | | AAAGGGCAAGTCCAAGAAACTGAAGAGTGTGAAAGAGCTGCTGGGGAT |
| | | CACCATCATGGAAAGAAGCAGCTTCGAGAAGAATCCCATCGACTTTCTGG |
| | | AAGCCAAGGGCTACAAAGAAGTGAAAAAGGACCTGATCATCAAGCTGCC |
| | | TAAGTACTCCCTGTTCGAGCTGGAAAACGGCCGGAAGAGAATGCTGGCC |
| | | TCTGCCGGCGAACTGCAGAAGGGAAACGAACTGGCCCTGCCCTCCAAAT |
| | | ATGTGAACTTCCTGTACCTGGCCAGCCACTATGAGAAGCTGAAGGGCTCC |
| | | CCCGAGGATAATGAGCAGAAACAGCTGTTTGTGGAACAGCACAAACACT |
| | | ACCTGGACGAGATCATCGAGCAGATCAGCGAGTTCTCCAAGAGAGTGAT |
| | | CCTGGCCGACGCTAATCTGGACAAGGTGCTGAGCGCCTACAACAAGCAC |
| | | AGAGACAAGCCTATCAGAGAGCAGGCCGAGAATATCATCCACCTGTTTA |
| | | CCCTGACCAATCTGGGAGCCCCTGCCGCCTTCAAGTACTTTGACACCACC |
| | | ATCGACCGGAAGAGGTACACCAGCACCAAAGAGGTGCTGGACGCCACCC |
| | | TGATCCACCAGAGCATCACCGGCCTGTACGAGACACGGATCGACCTGTCT |
| | | CAGCTGGGAGGCGACAGCGGAAGTGAGACCCCAGGTACATCCGAATCA |
| | | GCAACGCCTGAAAGCACCGGTCGGACACTGGTGACCTTCAAGGATGTAT |
| | | TTGTGGACTTCACCAGGGAGGAGTGGAAGCTGCTGGACACTGCTCAGCA |
| | | GATCGTGTACAGAAATGTGATGCTGGAGAACTATAAGAACCTGGTTTCCT |
| | | TGGGTTATCAGCTTACTAAGCCAGATGTGATCCTCCGGTTGGAGAAGGG |
| | | AGAAGAGCCCAGCGCTGATTACAAAGATGATGACGATAAAGCCCCAAAA |
| | | AAGAAGAGAAAGGTACCGAAGAAAAAAAGAAAGGTC |
| 1748 | Fusion Protein | MPKKKRKVPKKKRKVNHDQEFDPPKVYPPVPAEKRKPIRVLSLFDGIATGLLV |
| | 6 Amino Acid | LKDLGIQVDRYIASEVCEDSITVGMVRHQGKIMYVGDVRSVTQKHIQEWGP |
| | Sequence | FDLVIGGSPCNDLSIVNPARKGLYEGTGRLFFEFYRLLHDARPKEGDDRPFFW |
| | NLS-NLS-3A-3L- | LFENVVAMGVSDKRDISRFLESNPVMIDAKEVSAAHRARYFWGNLPGMNR |
| | dCas9-KRAB-NLS- | PLASTVNDKLELQECLEHGRIAKFSKVRTITTRSNSIKQGKDQHFPVFMNEKE |
| | NLS | DILWCTEMERVFGFPVHYTDVSNMSRLARQRLLGRSWSVPVIRHLFAPLKEY |
| | | FACVSSGNSNANSRGPSFSSGLVPLSLRGSHMGPMEIYKTVSAWKRQPVRV |
| | | LSLFRNIDKVLKSLGFLESGSGSGGGTLKYVEDVTNVVRRDVEKWGPFDLVY |
| | | GSTQPLGSSCDRCPGWYMFQFHRILQYALPRQESQRPFFWIFMDNLLLTED |
| | | DQETTTRFLQTEAVTLQDVRGRDYQNAMRVWSNIPGLKSKHAPLTPKEEEY |
| | | LQAQVRSRSKLDAPKVDLLVKNCLLPLREYFKYFSQNSLPLGGPSSGAPPPSG |
| | | GSPAGSPTSTEEGTSESATPESGPGTSTEPSEGSAPGSPAGSPTSTEEGTSTEP |
| | | SEGSAPGTSTEPSEMDKKYSIGLAIGTNSVGWAVITDEYKVPSKKFKVLGNTD |
| | | RHSIKKNLIGALLFDSGETAEATRLKRTARRRYTRRKNRICYLQEIFSNEMAKV |
| | | DDSFFHRLEESFLVEEDKKHERHPIFGNIVDEVAYHEKYPTIYHLRKKLVDSTD |
| | | KADLRLIYLALAHMIKFRGHFLIEGDLNPDNSDVDKLFIQLVQTYNQLFEENPI |
| | | NASGVDAKAILSARLSKSRRLENLIAQLPGEKKNGLFGNLIALSLGLTPNFKSN |
| | | FDLAEDAKLQLSKDTYDDDLDNLLAQIGDQYADLFLAAKNLSDAILLSDILRV |
| | | NTEITKAPLSASMIKRYDEHHQDLTLLKALVRQQLPEKYKEIFFDQSKNGYAG |
| | | YIDGGASQEEFYKFIKPILEKMDGTEELLVKLNREDLLRKQRTFDNGSIPHQIH |
| | | LGELHAILRRQEDFYPFLKDNREKIEKILTFRIPYYVGPLARGNSRFAWMTRKS |
| | | EETITPWNFEEVVDKGASAQSFIERMTNFDKNLPNEKVLPKHSLLYEYFTVYN |
| | | ELTKVKYVTEGMRKPAFLSGEQKKAIVDLLFKTNRKVTVKQLKEDYFKKIECF |
| | | DSVEISGVEDRFNASLGTYHDLLKIIKDKDFLDNEENEDILEDIVLTLTLFEDRE |
| | | MIEERLKTYAHLFDDKVMKQLKRRRYTGWGRLSRKLINGIRDKQSGKTILDFL |
| | | KSDGFANRNFMQLIHDDSLTFKEDIQKAQVSGQGDSLHEHIANLAGSPAIKK |
| | | GILQTVKVVDELVKVMGRHKPENIVIEMARENQTTQKGQKNSRERMKRIEE |
| | | GIKELGSQILKEHPVENTQLQNEKLYLYYLQNGRDMYVDQELDINRLSDYDV |
| | | DAIVPQSFLKDDSIDNKVLTRSDKNRGKSDNVPSEEVVKKMKNYWRQLLNA |
| | | KLITQRKFDNLTKAERGGLSELDKAGFIKRQLVETRQITKHVAQILDSRMNTK |
| | | YDENDKLIREVKVITLKSKLVSDFRKDFQFYKVREINNYHHAHDAYLNAVVGT |
| | | ALIKKYPKLESEFVYGDYKVYDVRKMIAKSEQEIGKATAKYFFYSNIMNFFKTEI |
| | | TLANGEIRKRPLIETNGETGEIVWDKGRDFATVRKVLSMPQVNIVKKTEVQT |
| | | GGFSKESILPKRNSDKLIARKKDWDPKKYGGFDSPTVAYSVLVVAKVEKGKSK |
| | | KLKSVKELLGITIMERSSFEKNPIDFLEAKGYKEVKKDLIIKLPKYSLFELENGR |
| | | KRMLASAGELQKGNELALPSKYVNFLYLASHYEKLKGSPEDNEQKQLFVEQHK |
| | | HYLDEIIEQISEFSKRVILADANLDKVLSAYNKHRDKPIREQAENIIHLFTLTNL |
| | | GAPAAFKYFDTTIDRKRYTSTKEVLDATLIHQSITGLYETRIDLSQLGGDSGSET |
| | | PGTSESATPESTGRTLVTFKDVFVDFTREEWKLLDTAQQIVYRNVMLENYKNL |
| | | VSLGYQLTKPDVILRLEKGEEPSADYKDDDDKAPKKKRKVPKKKRKV |
| 1749 | Fusion Protein | ATGCCAAAAAAGAAGAGAAAGGTACCGAAGAAAAAAAGAAAGGTATAC |
| | 6 DNA Sequence | AACCATGACCAGGAATTCGACCCCCCAAAGGTTTACCCACCTGTGCCAGC |
| | | TGAGAAGAGGAAGCCCATCCGCGTGCTGTCTCTCTTTGATGGGATTGCTA |
| | | CAGGGCTCCTGGTGCTGAAGGACCTGGGCATCCAAGTGGACCGCTACAT |
| | | TGCCTCCGAGGTGTGTGAGGACTCCATCACGGTGGGCATGGTGCGGCAC |
| | | CAGGGAAAGATCATGTACGTCGGGGACGTCCGCAGCGTCACACAGAAGC |
| | | ATATCCAGGAGTGGGGCCCATTCGACCTGGTGATTGGAGGCAGTCCCTG |
| | | CAATGACCTCTCCATTGTCAACCCTGCCCGCAAGGGACTTTATGAGGGTA |
| | | CTGGCCGCCTCTTCTTTGAGTTCTACCGCCTCCTGCATGATGCGCGGCCCA |
| | | AGGAGGGAGATGATCGCCCCTTCTTCTGGCTCTTTGAGAATGTGGTGGCC |
| | | ATGGGCGTTAGTGACAAGAGGGACATCTCGCGATTTCTTGAGTCTAACCC |
| | | CGTGATGATTGACGCCAAAGAAGTGTCTGCTGCACACAGGGCCCGTTAC |
| | | TTCTGGGGTAACCTTCCTGGCATGAACAGGCCTTTGGCATCCACTGTGAA |
| | | TGATAAGCTGGAGCTGCAAGAGTGTCTGGAGCACGGCAGAATAGCCAA |
| | | GTTCAGCAAAGTGAGGACCATTACCACCAGGTCAAACTCTATAAAGCAG |
| | | GGCAAAGACCAGCATTTCCCCGTCTTCATGAACGAGAAGGAGGACATCC |
| | | TGTGGTGCACTGAAATGGAAAGGGTGTTTGGCTTCCCCGTCCACTACACA |
| | | GACGTCTCCAACATGAGCCGCTTGGCGAGGCAGAGACTGCTGGGCCGAT |
| | | CGTGGAGCGTGCCGGTCATCCGCCACCTCTTCGCTCCGCTGAAGGAATAT |
| | | TTTGCTTGTGTGTCTAGCGGCAATAGTAACGCTAACAGCCGCGGGCCGA |
| | | GCTTCAGCAGCGGCCTGGTGCCGTTAAGCTTGCGCGGCAGCCATATGGG |
| | | CCCTATGGAGATATACAAGACAGTGTCTGCATGGAAGAGACAGCCAGTG |
| | | CGGGTACTGAGCCTCTTCAGAAACATCGACAAGGTACTAAAGAGTTTGG |
| | | GCTTCTTGGAAAGCGGTTCTGGTTCTGGGGGAGGAACGCTGAAGTACGT |
| | | GGAAGATGTCACAAATGTCGTGAGGAGAGACGTGGAGAAATGGGGCCC |
| | | CTTTGACCTGGTGTACGGCTCGACGCAGCCCCTAGGCAGCTCTTGTGATC |
| | | GCTGTCCCGGCTGGTACATGTTCCAGTTCCACCGGATCCTGCAGTATGCG |
| | | CTGCCTCGCCAGGAGAGTCAGCGGCCCTTCTTCTGGATATTCATGGACAA |
| | | TCTGCTGCTGACTGAGGATGACCAAGAGACAACTACCCGCTTCCTTCAGA |
| | | CAGAGGCTGTGACCCTCCAGGATGTCCGTGGCAGAGACTACCAGAATGC |
| | | TATGCGGGTGTGGAGCAACATTCCAGGGCTGAAGAGCAAGCATGCGCCC |
| | | CTGACCCCAAAGGAAGAAGAGTATCTGCAAGCCCAAGTCAGAAGCAGGA |
| | | GCAAGCTGGACGCCCCGAAAGTTGACCTCCTGGTGAAGAACTGCCTTCTC |
| | | CCGCTGAGAGAGTACTTCAAGTATTTTTCTCAAAACTCACTTCCTCTTGGA |
| | | GGGCCGAGCTCTGGCGCACCCCCACCAAGTGGAGGGTCTCCTGCCGGGT |
| | | CCCCAACATCTACTGAAGAAGGCACCAGCGAATCCGCAACGCCCGAGTC |
| | | AGGCCCTGGTACCTCCACAGAACCATCTGAAGGTAGTGCGCCTGGTTCCC |
| | | CAGCTGGAAGCCCTACTTCCACCGAAGAAGGCACGTCAACCGAACCAAG |
| | | TGAAGGATCTGCCCCTGGGACCAGCACTGAACCATCTGAGATGGACAAG |
| | | AAGTACAGCATCGGCCTGGCCATCGGCACCAACTCTGTGGGCTGGGCCG |
| | | TGATCACCGACGAGTACAAGGTGCCCAGCAAGAAATTCAAGGTGCTGGG |
| | | CAACACCGACCGGCACAGCATCAAGAAGAACCTGATCGGCGCCCTGCTG |
| | | TTCGACAGCGGAGAAACAGCCGAGGCCACCCGGCTGAAGAGAACCGCC |
| | | AGAAGAAGATACACCAGACGGAAGAACCGGATCTGCTATCTGCAAGAGA |
| | | TCTTCAGCAACGAGATGGCCAAGGTGGACGACAGCTTCTTCCACAGACTG |
| | | GAAGAGTCCTTCCTGGTGGAAGAGGATAAGAAGCACGAGCGGCACCCC |
| | | ATCTTCGGCAACATCGTGGACGAGGTGGCCTACCACGAGAAGTACCCCA |
| | | CCATCTACCACCTGAGAAAGAAACTGGTGGACAGCACCGACAAGGCCGA |
| | | CCTGCGGCTGATCTATCTGGCCCTGGCCCACATGATCAAGTTCCGGGGCC |
| | | ACTTCCTGATCGAGGGCGACCTGAACCCCGACAACAGCGACGTGGACAA |
| | | GCTGTTCATCCAGCTGGTGCAGACCTACAACCAGCTGTTCGAGGAAAACC |
| | | CCATCAACGCCAGCGGCGTGGACGCCAAGGCCATCCTGTCTGCCAGACT |
| | | GAGCAAGAGCAGACGGCTGGAAAATCTGATCGCCCAGCTGCCCGGCGA |
| | | GAAGAAGAATGGCCTGTTCGGCAACCTGATTGCCCTGAGCCTGGGCCTG |
| | | ACCCCCAACTTCAAGAGCAACTTCGACCTGGCCGAGGATGCCAAACTGCA |
| | | GCTGAGCAAGGACACCTACGACGACGACCTGGACAACCTGCTGGCCCAG |
| | | ATCGGCGACCAGTACGCCGACCTGTTTCTGGCCGCCAAGAACCTGTCCGA |
| | | CGCCATCCTGCTGAGCGACATCCTGAGAGTGAACACCGAGATCACCAAG |
| | | GCCCCCCTGAGCGCCTCTATGATCAAGAGATACGACGAGCACCACCAGG |
| | | ACCTGACCCTGCTGAAAGCTCTCGTGCGGCAGCAGCTGCCTGAGAAGTA |
| | | CAAAGAGATTTTCTTCGACCAGAGCAAGAACGGCTACGCCGGCTACATC |
| | | GATGGCGGAGCCAGCCAGGAAGAGTTCTACAAGTTCATCAAGCCCATCC |
| | | TGGAAAAGATGGACGGCACCGAGGAACTGCTCGTGAAGCTGAACAGAG |
| | | AGGACCTGCTGCGGAAGCAGCGGACCTTCGACAACGGCAGCATCCCCCA |
| | | CCAGATCCACCTGGGAGAGCTGCACGCCATTCTGCGGCGGCAGGAAGAT |
| | | TTTTACCCATTCCTGAAGGACAACCGGGAAAAGATCGAGAAGATCCTGAC |
| | | CTTCCGCATCCCCTACTACGTGGGCCCTCTGGCCAGGGGAAACAGCAGAT |
| | | TCGCCTGGATGACCAGAAAGAGCGAGGAAACCATCACCCCCTGGAACTT |
| | | CGAGGAAGTGGTGGACAAGGGCGCCAGCGCCCAGAGCTTCATCGAGCG |
| | | GATGACCAACTTCGATAAGAACCTGCCCAACGAGAAGGTGCTGCCCAAG |
| | | CACAGCCTGCTGTACGAGTACTTCACCGTGTACAACGAGCTGACCAAAGT |
| | | GAAATACGTGACCGAGGGAATGAGAAAGCCCGCCTTCCTGAGCGGCGA |
| | | GCAGAAAAAAGCCATCGTGGACCTGCTGTTCAAGACCAACCGGAAAGTG |
| | | ACCGTGAAGCAGCTGAAAGAGGACTACTTCAAGAAAATCGAGTGCTTCG |
| | | ACTCCGTGGAAATCTCCGGCGTGGAAGATCGGTTCAACGCCTCCCTGGG |
| | | CACATACCACGATCTGCTGAAAATTATCAAGGACAAGGACTTCCTGGACA |
| | | ATGAGGAAAACGAGGACATTCTGGAAGATATCGTGCTGACCCTGACACT |
| | | GTTTGAGGACAGAGAGATGATCGAGGAACGGCTGAAAACCTATGCCCAC |
| | | CTGTTCGACGACAAAGTGATGAAGCAGCTGAAGCGGCGGAGATACACCG |
| | | GCTGGGGCAGGCTGAGCCGGAAGCTGATCAACGGCATCCGGGACAAGC |
| | | AGTCCGGCAAGACAATCCTGGATTTCCTGAAGTCCGACGGCTTCGCCAAC |
| | | AGAAACTTCATGCAGCTGATCCACGACGACAGCCTGACCTTTAAAGAGG |
| | | ACATCCAGAAAGCCCAGGTGTCCGGCCAGGGCGATAGCCTGCACGAGCA |
| | | CATTGCCAATCTGGCCGGCAGCCCCGCCATTAAGAAGGGCATCCTGCAG |
| | | ACAGTGAAGGTGGTGGACGAGCTCGTGAAAGTGATGGGCCGGCACAAG |
| | | CCCGAGAACATCGTGATCGAAATGGCCAGAGAGAACCAGACCACCCAGA |
| | | AGGGACAGAAGAACAGCCGCGAGAGAATGAAGCGGATCGAAGAGGGC |
| | | ATCAAAGAGCTGGGCAGCCAGATCCTGAAAGAACACCCCGTGGAAAACA |
| | | CCCAGCTGCAGAACGAGAAGCTGTACCTGTACTACCTGCAGAATGGGCG |
| | | GGATATGTACGTGGACCAGGAACTGGACATCAACCGGCTGTCCGACTAC |
| | | GATGTGGACGCTATCGTGCCTCAGAGCTTTCTGAAGGACGACTCCATCGA |
| | | TAACAAAGTGCTGACTCGGAGCGACAAGAACCGGGGCAAGAGCGACAA |
| | | CGTGCCCTCCGAAGAGGTCGTGAAGAAGATGAAGAACTACTGGCGCCAG |
| | | CTGCTGAATGCCAAGCTGATTACCCAGAGGAAGTTCGACAATCTGACCAA |
| | | GGCCGAGAGAGGCGGCCTGAGCGAACTGGATAAGGCCGGCTTCATCAA |
| | | GAGACAGCTGGTGGAAACCCGGCAGATCACAAAGCACGTGGCACAGAT |
| | | CCTGGACTCCCGGATGAACACTAAGTACGACGAGAACGACAAACTGATC |
| | | CGGGAAGTGAAAGTGATCACCCTGAAGTCCAAGCTGGTGTCCGATTTCC |
| | | GGAAGGATTTCCAGTTTTACAAAGTGCGCGAGATCAACAACTACCACCAC |
| | | GCCCACGACGCCTACCTGAACGCCGTCGTGGGAACCGCCCTGATCAAAA |
| | | AGTACCCTAAGCTGGAAAGCGAGTTCGTGTACGGCGACTACAAGGTGTA |
| | | CGACGTGCGGAAGATGATCGCCAAGAGCGAGCAGGAAATCGGCAAGGC |
| | | TACCGCCAAGTACTTCTTCTACAGCAACATCATGAACTTTTTCAAGACCGA |
| | | GATTACCCTGGCCAACGGCGAGATCCGGAAGCGGCCTCTGATCGAGACA |
| | | AACGGCGAAACAGGCGAGATCGTGTGGGATAAGGGCCGGGACTTTGCC |
| | | ACCGTGCGGAAAGTGCTGTCTATGCCCCAAGTGAATATCGTGAAAAAGA |
| | | CCGAGGTGCAGACAGGCGGCTTCAGCAAAGAGTCTATCCTGCCCAAGAG |
| | | GAACAGCGACAAGCTGATCGCCAGAAAGAAGGACTGGGACCCTAAGAA |
| | | GTACGGCGGCTTCGACAGCCCCACCGTGGCCTATTCTGTGCTGGTGGTG |
| | | GCCAAAGTGGAAAAGGGCAAGTCCAAGAAACTGAAGAGTGTGAAAGAG |
| | | CTGCTGGGGATCACCATCATGGAAAGAAGCAGCTTCGAGAAGAATCCCA |
| | | TCGACTTTCTGGAAGCCAAGGGCTACAAAGAAGTGAAAAAGGACCTGAT |
| | | CATCAAGCTGCCTAAGTACTCCCTGTTCGAGCTGGAAAACGGCCGGAAG |
| | | AGAATGCTGGCCTCTGCCGGCGAACTGCAGAAGGGAAACGAACTGGCCC |
| | | TGCCCTCCAAATATGTGAACTTCCTGTACCTGGCCAGCCACTATGAGAAG |
| | | CTGAAGGGCTCCCCCGAGGATAATGAGCAGAAACAGCTGTTTGTGGAAC |
| | | AGCACAAACACTACCTGGACGAGATCATCGAGCAGATCAGCGAGTTCTC |
| | | CAAGAGAGTGATCCTGGCCGACGCTAATCTGGACAAGGTGCTGAGCGCC |
| | | TACAACAAGCACAGAGACAAGCCTATCAGAGAGCAGGCCGAGAATATCA |
| | | TCCACCTGTTTACCCTGACCAATCTGGGAGCCCCTGCCGCCTTCAAGTACT |
| | | TTGACACCACCATCGACCGGAAGAGGTACACCAGCACCAAAGAGGTGCT |
| | | GGACGCCACCCTGATCCACCAGAGCATCACCGGCCTGTACGAGACACGG |
| | | ATCGACCTGTCTCAGCTGGGAGGCGACAGCGGAAGTGAGACCCCAGGTA |
| | | CATCCGAATCAGCAACGCCTGAAAGCACCGGTCGGACACTGGTGACCTTC |
| | | AAGGATGTATTTGTGGACTTCACCAGGGAGGAGTGGAAGCTGCTGGACA |
| | | CTGCTCAGCAGATCGTGTACAGAAATGTGATGCTGGAGAACTATAAGAA |
| | | CCTGGTTTCCTTGGGTTATCAGCTTACTAAGCCAGATGTGATCCTCCGGTT |
| | | GGAGAAGGGAGAAGAGCCCAGCGCTGATTACAAAGATGATGACGATAA |
| | | AGCCCCAAAAAAGAAGAGAAAGGTACCGAAGAAAAAAAGAAAGGTC |
| 1750 | Fusion Protein | MPKKKRKVPKKKRKVNHDQEFDPPKVYPPVPAEKRKPIRVLSLFDGIATGLLV |
| | 7 Amino Acid | LKDLGIQVDRYIASEVCEDSITVGMVRHQGKIMYVGDVRSVTQKHIQEWGP |
| | Sequence | FDLVIGGSPCNDLSIVNPARKGLYEGTGRLFFEFYRLLHDARPKEGDDRPFFW |
| | NLS-NLS-3A-3L- | LFENVVAMGVSDKRDISRFLESNPVMIDAKEVSAAHRARYFWGNLPGMNR |
| | dCas9-ZIM-NLS- | PLASTVNDKLELQECLEHGRIAKFSKVRTITTRSNSIKQGKDQHFPVFMNEKE |
| | NLS | DILWCTEMERVFGFPVHYTDVSNMSRLARQRLLGRSWSVPVIRHLFAPLKEY |
| | | FACVSSGNSNANSRGPSFSSGLVPLSLRGSHMGPMEIYKTVSAWKRQPVRV |
| | | LSLFRNIDKVLKSLGFLESGSGSGGGTLKYVEDVTNVVRRDVEKWGPFDLVY |
| | | GSTQPLGSSCDRCPGWYMFQFHRILQYALPRQESQRPFFWIFMDNLLLTED |
| | | DQETTTRFLQTEAVTLQDVRGRDYQNAMRVWSNIPGLKSKHAPLTPKEEEY |
| | | LQAQVRSRSKLDAPKVDLLVKNCLLPLREYFKYFSQNSLPLGGPSSGAPPPSG |
| | | GSPAGSPTSTEEGTSESATPESGPGTSTEPSEGSAPGSPAGSPTSTEEGTSTEP |
| | | SEGSAPGTSTEPSEMDKKYSIGLAIGTNSVGWAVITDEYKVPSKKFKVLGNTD |
| | | RHSIKKNLIGALLFDSGETAEATRLKRTARRRYTRRKNRICYLQEIFSNEMAKV |
| | | DDSFFHRLEESFLVEEDKKHERHPIFGNIVDEVAYHEKYPTIYHLRKKLVDSTD |
| | | KADLRLIYLALAHMIKFRGHFLIEGDLNPDNSDVDKLFIQLVQTYNQLFEENPI |
| | | NASGVDAKAILSARLSKSRRLENLIAQLPGEKKNGLFGNLIALSLGLTPNFKSN |
| | | FDLAEDAKLQLSKDTYDDDLDNLLAQIGDQYADLFLAAKNLSDAILLSDILRV |
| | | NTEITKAPLSASMIKRYDEHHQDLTLLKALVRQQLPEKYKEIFFDQSKNGYAG |
| | | YIDGGASQEEFYKFIKPILEKMDGTEELLVKLNREDLLRKQRTFDNGSIPHQIH |
| | | LGELHAILRRQEDFYPFLKDNREKIEKILTFRIPYYVGPLARGNSRFAWMTRKS |
| | | EETITPWNFEEVVDKGASAQSFIERMTNFDKNLPNEKVLPKHSLLYEYFTVYN |
| | | ELTKVKYVTEGMRKPAFLSGEQKKAIVDLLFKTNRKVTVKQLKEDYFKKIECF |
| | | DSVEISGVEDRFNASLGTYHDLLKIIKDKDFLDNEENEDILEDIVLTLTLFEDRE |
| | | MIEERLKTYAHLFDDKVMKQLKRRRYTGWGRLSRKLINGIRDKQSGKTILDFL |
| | | KSDGFANRNFMQLIHDDSLTFKEDIQKAQVSGQGDSLHEHIANLAGSPAIKK |
| | | GILQTVKVVDELVKVMGRHKPENIVIEMARENQTTQKGQKNSRERMKRIEE |
| | | GIKELGSQILKEHPVENTQLQNEKLYLYYLQNGRDMYVDQELDINRLSDYDV |
| | | DAIVPQSFLKDDSIDNKVLTRSDKNRGKSDNVPSEEVVKKMKNYWRQLLNA |
| | | KLITQRKFDNLTKAERGGLSELDKAGFIKRQLVETRQITKHVAQILDSRMNTK |
| | | YDENDKLIREVKVITLKSKLVSDFRKDFQFYKVREINNYHHAHDAYLNAVVGT |
| | | ALIKKYPKLESEFVYGDYKVYDVRKMIAKSEQEIGKATAKYFFYSNIMNFFKTEI |
| | | TLANGEIRKRPLIETNGETGEIVWDKGRDFATVRKVLSMPQVNIVKKTEVQT |
| | | GGFSKESILPKRNSDKLIARKKDWDPKKYGGFDSPTVAYSVLVVAKVEKGKSK |
| | | KLKSVKELLGITIMERSSFEKNPIDFLEAKGYKEVKKDLIIKLPKYSLFELENGR |
| | | KRMLASAGELQKGNELALPSKYVNFLYLASHYEKLKGSPEDNEQKQLFVEQHK |
| | | HYLDEIIEQISEFSKRVILADANLDKVLSAYNKHRDKPIREQAENIIHLFTLTNL |
| | | GAPAAFKYFDTTIDRKRYTSTKEVLDATLIHQSITGLYETRIDLSQLGGDSGSET |
| | | PGTSESATPESTGMNNSQGRVTFEDVTVNFTQGEWQRLNPEQRNLYRDVM |
| | | LENYSNLVSVGQGETTKPDVILRLEQGKEPWLEEEEVLGSGRAEKNGDIGGQ |
| | | IWKPKDVKESLSADYKDDDDKAPKKKRKVPKKKRKV |
| 1751 | Fusion Protein | ATGCCAAAAAAGAAGAGAAAGGTACCGAAGAAAAAAAGAAAGGTATAC |
| | 7 DNA Sequence | AACCATGACCAGGAATTCGACCCCCCAAAGGTTTACCCACCTGTGCCAGC |
| | | TGAGAAGAGGAAGCCCATCCGCGTGCTGTCTCTCTTTGATGGGATTGCTA |
| | | CAGGGCTCCTGGTGCTGAAGGACCTGGGCATCCAAGTGGACCGCTACAT |
| | | TGCCTCCGAGGTGTGTGAGGACTCCATCACGGTGGGCATGGTGCGGCAC |
| | | CAGGGAAAGATCATGTACGTCGGGGACGTCCGCAGCGTCACACAGAAGC |
| | | ATATCCAGGAGTGGGGCCCATTCGACCTGGTGATTGGAGGCAGTCCCTG |
| | | CAATGACCTCTCCATTGTCAACCCTGCCCGCAAGGGACTTTATGAGGGTA |
| | | CTGGCCGCCTCTTCTTTGAGTTCTACCGCCTCCTGCATGATGCGCGGCCCA |
| | | AGGAGGGAGATGATCGCCCCTTCTTCTGGCTCTTTGAGAATGTGGTGGCC |
| | | ATGGGCGTTAGTGACAAGAGGGACATCTCGCGATTTCTTGAGTCTAACCC |
| | | CGTGATGATTGACGCCAAAGAAGTGTCTGCTGCACACAGGGCCCGTTAC |
| | | TTCTGGGGTAACCTTCCTGGCATGAACAGGCCTTTGGCATCCACTGTGAA |
| | | TGATAAGCTGGAGCTGCAAGAGTGTCTGGAGCACGGCAGAATAGCCAA |
| | | GTTCAGCAAAGTGAGGACCATTACCACCAGGTCAAACTCTATAAAGCAG |
| | | GGCAAAGACCAGCATTTCCCCGTCTTCATGAACGAGAAGGAGGACATCC |
| | | TGTGGTGCACTGAAATGGAAAGGGTGTTTGGCTTCCCCGTCCACTACACA |
| | | GACGTCTCCAACATGAGCCGCTTGGCGAGGCAGAGACTGCTGGGCCGAT |
| | | CGTGGAGCGTGCCGGTCATCCGCCACCTCTTCGCTCCGCTGAAGGAATAT |
| | | TTTGCTTGTGTGTCTAGCGGCAATAGTAACGCTAACAGCCGCGGGCCGA |
| | | GCTTCAGCAGCGGCCTGGTGCCGTTAAGCTTGCGCGGCAGCCATATGGG |
| | | CCCTATGGAGATATACAAGACAGTGTCTGCATGGAAGAGACAGCCAGTG |
| | | CGGGTACTGAGCCTCTTCAGAAACATCGACAAGGTACTAAAGAGTTTGG |
| | | GCTTCTTGGAAAGCGGTTCTGGTTCTGGGGGAGGAACGCTGAAGTACGT |
| | | GGAAGATGTCACAAATGTCGTGAGGAGAGACGTGGAGAAATGGGGCCC |
| | | CTTTGACCTGGTGTACGGCTCGACGCAGCCCCTAGGCAGCTCTTGTGATC |
| | | GCTGTCCCGGCTGGTACATGTTCCAGTTCCACCGGATCCTGCAGTATGCG |
| | | CTGCCTCGCCAGGAGAGTCAGCGGCCCTTCTTCTGGATATTCATGGACAA |
| | | TCTGCTGCTGACTGAGGATGACCAAGAGACAACTACCCGCTTCCTTCAGA |
| | | CAGAGGCTGTGACCCTCCAGGATGTCCGTGGCAGAGACTACCAGAATGC |
| | | TATGCGGGTGTGGAGCAACATTCCAGGGCTGAAGAGCAAGCATGCGCCC |
| | | CTGACCCCAAAGGAAGAAGAGTATCTGCAAGCCCAAGTCAGAAGCAGGA |
| | | GCAAGCTGGACGCCCCGAAAGTTGACCTCCTGGTGAAGAACTGCCTTCTC |
| | | CCGCTGAGAGAGTACTTCAAGTATTTTTCTCAAAACTCACTTCCTCTTGGA |
| | | GGGCCGAGCTCTGGCGCACCCCCACCAAGTGGAGGGTCTCCTGCCGGGT |
| | | CCCCAACATCTACTGAAGAAGGCACCAGCGAATCCGCAACGCCCGAGTC |
| | | AGGCCCTGGTACCTCCACAGAACCATCTGAAGGTAGTGCGCCTGGTTCCC |
| | | CAGCTGGAAGCCCTACTTCCACCGAAGAAGGCACGTCAACCGAACCAAG |
| | | TGAAGGATCTGCCCCTGGGACCAGCACTGAACCATCTGAGATGGACAAG |
| | | AAGTACAGCATCGGCCTGGCCATCGGCACCAACTCTGTGGGCTGGGCCG |
| | | TGATCACCGACGAGTACAAGGTGCCCAGCAAGAAATTCAAGGTGCTGGG |
| | | CAACACCGACCGGCACAGCATCAAGAAGAACCTGATCGGCGCCCTGCTG |
| | | TTCGACAGCGGAGAAACAGCCGAGGCCACCCGGCTGAAGAGAACCGCC |
| | | AGAAGAAGATACACCAGACGGAAGAACCGGATCTGCTATCTGCAAGAGA |
| | | TCTTCAGCAACGAGATGGCCAAGGTGGACGACAGCTTCTTCCACAGACTG |
| | | GAAGAGTCCTTCCTGGTGGAAGAGGATAAGAAGCACGAGCGGCACCCC |
| | | ATCTTCGGCAACATCGTGGACGAGGTGGCCTACCACGAGAAGTACCCCA |
| | | CCATCTACCACCTGAGAAAGAAACTGGTGGACAGCACCGACAAGGCCGA |
| | | CCTGCGGCTGATCTATCTGGCCCTGGCCCACATGATCAAGTTCCGGGGCC |
| | | ACTTCCTGATCGAGGGCGACCTGAACCCCGACAACAGCGACGTGGACAA |
| | | GCTGTTCATCCAGCTGGTGCAGACCTACAACCAGCTGTTCGAGGAAAACC |
| | | CCATCAACGCCAGCGGCGTGGACGCCAAGGCCATCCTGTCTGCCAGACT |
| | | GAGCAAGAGCAGACGGCTGGAAAATCTGATCGCCCAGCTGCCCGGCGA |
| | | GAAGAAGAATGGCCTGTTCGGCAACCTGATTGCCCTGAGCCTGGGCCTG |
| | | ACCCCCAACTTCAAGAGCAACTTCGACCTGGCCGAGGATGCCAAACTGCA |
| | | GCTGAGCAAGGACACCTACGACGACGACCTGGACAACCTGCTGGCCCAG |
| | | ATCGGCGACCAGTACGCCGACCTGTTTCTGGCCGCCAAGAACCTGTCCGA |
| | | CGCCATCCTGCTGAGCGACATCCTGAGAGTGAACACCGAGATCACCAAG |
| | | GCCCCCCTGAGCGCCTCTATGATCAAGAGATACGACGAGCACCACCAGG |
| | | ACCTGACCCTGCTGAAAGCTCTCGTGCGGCAGCAGCTGCCTGAGAAGTA |
| | | CAAAGAGATTTTCTTCGACCAGAGCAAGAACGGCTACGCCGGCTACATC |
| | | GATGGCGGAGCCAGCCAGGAAGAGTTCTACAAGTTCATCAAGCCCATCC |
| | | TGGAAAAGATGGACGGCACCGAGGAACTGCTCGTGAAGCTGAACAGAG |
| | | AGGACCTGCTGCGGAAGCAGCGGACCTTCGACAACGGCAGCATCCCCCA |
| | | CCAGATCCACCTGGGAGAGCTGCACGCCATTCTGCGGCGGCAGGAAGAT |
| | | TTTTACCCATTCCTGAAGGACAACCGGGAAAAGATCGAGAAGATCCTGAC |
| | | CTTCCGCATCCCCTACTACGTGGGCCCTCTGGCCAGGGGAAACAGCAGAT |
| | | TCGCCTGGATGACCAGAAAGAGCGAGGAAACCATCACCCCCTGGAACTT |
| | | CGAGGAAGTGGTGGACAAGGGCGCCAGCGCCCAGAGCTTCATCGAGCG |
| | | GATGACCAACTTCGATAAGAACCTGCCCAACGAGAAGGTGCTGCCCAAG |
| | | CACAGCCTGCTGTACGAGTACTTCACCGTGTACAACGAGCTGACCAAAGT |
| | | GAAATACGTGACCGAGGGAATGAGAAAGCCCGCCTTCCTGAGCGGCGA |
| | | GCAGAAAAAAGCCATCGTGGACCTGCTGTTCAAGACCAACCGGAAAGTG |
| | | ACCGTGAAGCAGCTGAAAGAGGACTACTTCAAGAAAATCGAGTGCTTCG |
| | | ACTCCGTGGAAATCTCCGGCGTGGAAGATCGGTTCAACGCCTCCCTGGG |
| | | CACATACCACGATCTGCTGAAAATTATCAAGGACAAGGACTTCCTGGACA |
| | | ATGAGGAAAACGAGGACATTCTGGAAGATATCGTGCTGACCCTGACACT |
| | | GTTTGAGGACAGAGAGATGATCGAGGAACGGCTGAAAACCTATGCCCAC |
| | | CTGTTCGACGACAAAGTGATGAAGCAGCTGAAGCGGCGGAGATACACCG |
| | | GCTGGGGCAGGCTGAGCCGGAAGCTGATCAACGGCATCCGGGACAAGC |
| | | AGTCCGGCAAGACAATCCTGGATTTCCTGAAGTCCGACGGCTTCGCCAAC |
| | | AGAAACTTCATGCAGCTGATCCACGACGACAGCCTGACCTTTAAAGAGG |
| | | ACATCCAGAAAGCCCAGGTGTCCGGCCAGGGCGATAGCCTGCACGAGCA |
| | | CATTGCCAATCTGGCCGGCAGCCCCGCCATTAAGAAGGGCATCCTGCAG |
| | | ACAGTGAAGGTGGTGGACGAGCTCGTGAAAGTGATGGGCCGGCACAAG |
| | | CCCGAGAACATCGTGATCGAAATGGCCAGAGAGAACCAGACCACCCAGA |
| | | AGGGACAGAAGAACAGCCGCGAGAGAATGAAGCGGATCGAAGAGGGC |
| | | ATCAAAGAGCTGGGCAGCCAGATCCTGAAAGAACACCCCGTGGAAAACA |
| | | CCCAGCTGCAGAACGAGAAGCTGTACCTGTACTACCTGCAGAATGGGCG |
| | | GGATATGTACGTGGACCAGGAACTGGACATCAACCGGCTGTCCGACTAC |
| | | GATGTGGACGCTATCGTGCCTCAGAGCTTTCTGAAGGACGACTCCATCGA |
| | | TAACAAAGTGCTGACTCGGAGCGACAAGAACCGGGGCAAGAGCGACAA |
| | | CGTGCCCTCCGAAGAGGTCGTGAAGAAGATGAAGAACTACTGGCGCCAG |
| | | CTGCTGAATGCCAAGCTGATTACCCAGAGGAAGTTCGACAATCTGACCAA |
| | | GGCCGAGAGAGGCGGCCTGAGCGAACTGGATAAGGCCGGCTTCATCAA |
| | | GAGACAGCTGGTGGAAACCCGGCAGATCACAAAGCACGTGGCACAGAT |
| | | CCTGGACTCCCGGATGAACACTAAGTACGACGAGAACGACAAACTGATC |
| | | CGGGAAGTGAAAGTGATCACCCTGAAGTCCAAGCTGGTGTCCGATTTCC |
| | | GGAAGGATTTCCAGTTTTACAAAGTGCGCGAGATCAACAACTACCACCAC |
| | | GCCCACGACGCCTACCTGAACGCCGTCGTGGGAACCGCCCTGATCAAAA |
| | | AGTACCCTAAGCTGGAAAGCGAGTTCGTGTACGGCGACTACAAGGTGTA |
| | | CGACGTGCGGAAGATGATCGCCAAGAGCGAGCAGGAAATCGGCAAGGC |
| | | TACCGCCAAGTACTTCTTCTACAGCAACATCATGAACTTTTTCAAGACCGA |
| | | GATTACCCTGGCCAACGGCGAGATCCGGAAGCGGCCTCTGATCGAGACA |
| | | AACGGCGAAACAGGCGAGATCGTGTGGGATAAGGGCCGGGACTTTGCC |
| | | ACCGTGCGGAAAGTGCTGTCTATGCCCCAAGTGAATATCGTGAAAAAGA |
| | | CCGAGGTGCAGACAGGCGGCTTCAGCAAAGAGTCTATCCTGCCCAAGAG |
| | | GAACAGCGACAAGCTGATCGCCAGAAAGAAGGACTGGGACCCTAAGAA |
| | | GTACGGCGGCTTCGACAGCCCCACCGTGGCCTATTCTGTGCTGGTGGTG |
| | | GCCAAAGTGGAAAAGGGCAAGTCCAAGAAACTGAAGAGTGTGAAAGAG |
| | | CTGCTGGGGATCACCATCATGGAAAGAAGCAGCTTCGAGAAGAATCCCA |
| | | TCGACTTTCTGGAAGCCAAGGGCTACAAAGAAGTGAAAAAGGACCTGAT |
| | | CATCAAGCTGCCTAAGTACTCCCTGTTCGAGCTGGAAAACGGCCGGAAG |
| | | AGAATGCTGGCCTCTGCCGGCGAACTGCAGAAGGGAAACGAACTGGCCC |
| | | TGCCCTCCAAATATGTGAACTTCCTGTACCTGGCCAGCCACTATGAGAAG |
| | | CTGAAGGGCTCCCCCGAGGATAATGAGCAGAAACAGCTGTTTGTGGAAC |
| | | AGCACAAACACTACCTGGACGAGATCATCGAGCAGATCAGCGAGTTCTC |
| | | CAAGAGAGTGATCCTGGCCGACGCTAATCTGGACAAGGTGCTGAGCGCC |
| | | TACAACAAGCACAGAGACAAGCCTATCAGAGAGCAGGCCGAGAATATCA |
| | | TCCACCTGTTTACCCTGACCAATCTGGGAGCCCCTGCCGCCTTCAAGTACT |
| | | TTGACACCACCATCGACCGGAAGAGGTACACCAGCACCAAAGAGGTGCT |
| | | GGACGCCACCCTGATCCACCAGAGCATCACCGGCCTGTACGAGACACGG |
| | | ATCGACCTGTCTCAGCTGGGAGGCGACAGCGGAAGTGAGACCCCAGGTA |
| | | CATCCGAATCAGCAACGCCTGAAAGCACCGGTATGAACAATTCACAGGG |
| | | GAGAGTGACATTCGAAGACGTGACCGTGAACTTCACCCAGGGAGAATGG |
| | | CAGCGCTTGAACCCAGAACAAAGGAACCTCTATCGGGACGTGATGCTGG |
| | | AAAACTACTCAAATTTGGTGAGCGTTGGGCAGGGTGAGACCACTAAGCC |
| | | TGACGTGATCCTGAGATTGGAACAGGGCAAGGAGCCTTGGCTCGAGGAA |
| | | GAGGAAGTCCTGGGCTCAGGGAGGGCCGAGAAAAACGGTGATATAGGA |
| | | GGCCAGATATGGAAGCCTAAGGACGTCAAGGAGAGCCTGAGCGCTGATT |
| | | ACAAAGATGATGACGATAAAGCCCCAAAAAAGAAGAGAAAGGTACCGA |
| | | AGAAAAAAAGAAAGGTC |
| 1752 | Fusion Protein | MPKKKRKVPKKKRKVNHDQEFDPPKVYPPVPAEKRKPIRVLSLFDGIATGLLV |
| | 8 Amino Acid | LKDLGIQVDRYIASEVCEDSITVGMVRHQGKIMYVGDVRSVTQKHIQEWGP |
| | Sequence | FDLVIGGSPCNDLSIVNPARKGLYEGTGRLFFEFYRLLHDARPKEGDDRPFFW |
| | NLS-NLS-3A-3L- | LFENVVAMGVSDKRDISRFLESNPVMIDAKEVSAAHRARYFWGNLPGMNR |
| | dCas9-ZFP-NLS- | PLASTVNDKLELQECLEHGRIAKFSKVRTITTRSNSIKQGKDQHFPVFMNEKE |
| | NLS | DILWCTEMERVFGFPVHYTDVSNMSRLARQRLLGRSWSVPVIRHLFAPLKEY |
| | | FACVSSGNSNANSRGPSFSSGLVPLSLRGSHMGPMEIYKTVSAWKRQPVRV |
| | | LSLFRNIDKVLKSLGFLESGSGSGGGTLKYVEDVTNVVRRDVEKWGPFDLVY |
| | | GSTQPLGSSCDRCPGWYMFQFHRILQYALPRQESQRPFFWIFMDNLLLTED |
| | | DQETTTRFLQTEAVTLQDVRGRDYQNAMRVWSNIPGLKSKHAPLTPKEEEY |
| | | LQAQVRSRSKLDAPKVDLLVKNCLLPLREYFKYFSQNSLPLGGPSSGAPPPSG |
| | | GSPAGSPTSTEEGTSESATPESGPGTSTEPSEGSAPGSPAGSPTSTEEGTSTEP |
| | | SEGSAPGTSTEPSEMDKKYSIGLAIGTNSVGWAVITDEYKVPSKKFKVLGNTD |
| | | RHSIKKNLIGALLFDSGETAEATRLKRTARRRYTRRKNRICYLQEIFSNEMAKV |
| | | DDSFFHRLEESFLVEEDKKHERHPIFGNIVDEVAYHEKYPTIYHLRKKLVDSTD |
| | | KADLRLIYLALAHMIKFRGHFLIEGDLNPDNSDVDKLFIQLVQTYNQLFEENPI |
| | | NASGVDAKAILSARLSKSRRLENLIAQLPGEKKNGLFGNLIALSLGLTPNFKSN |
| | | FDLAEDAKLQLSKDTYDDDLDNLLAQIGDQYADLFLAAKNLSDAILLSDILRV |
| | | NTEITKAPLSASMIKRYDEHHQDLTLLKALVRQQLPEKYKEIFFDQSKNGYAG |
| | | YIDGGASQEEFYKFIKPILEKMDGTEELLVKLNREDLLRKQRTFDNGSIPHQIH |
| | | LGELHAILRRQEDFYPFLKDNREKIEKILTFRIPYYVGPLARGNSRFAWMTRKS |
| | | EETITPWNFEEVVDKGASAQSFIERMTNFDKNLPNEKVLPKHSLLYEYFTVYN |
| | | ELTKVKYVTEGMRKPAFLSGEQKKAIVDLLFKTNRKVTVKQLKEDYFKKIECF |
| | | DSVEISGVEDRFNASLGTYHDLLKIIKDKDFLDNEENEDILEDIVLTLTLFEDRE |
| | | MIEERLKTYAHLFDDKVMKQLKRRRYTGWGRLSRKLINGIRDKQSGKTILDFL |
| | | KSDGFANRNFMQLIHDDSLTFKEDIQKAQVSGQGDSLHEHIANLAGSPAIKK |
| | | GILQTVKVVDELVKVMGRHKPENIVIEMARENQTTQKGQKNSRERMKRIEE |
| | | GIKELGSQILKEHPVENTQLQNEKLYLYYLQNGRDMYVDQELDINRLSDYDV |
| | | DAIVPQSFLKDDSIDNKVLTRSDKNRGKSDNVPSEEVVKKMKNYWRQLLNA |
| | | KLITQRKFDNLTKAERGGLSELDKAGFIKRQLVETRQITKHVAQILDSRMNTK |
| | | YDENDKLIREVKVITLKSKLVSDFRKDFQFYKVREINNYHHAHDAYLNAVVGT |
| | | ALIKKYPKLESEFVYGDYKVYDVRKMIAKSEQEIGKATAKYFFYSNIMNFFKTEI |
| | | TLANGEIRKRPLIETNGETGEIVWDKGRDFATVRKVLSMPQVNIVKKTEVQT |
| | | GGFSKESILPKRNSDKLIARKKDWDPKKYGGFDSPTVAYSVLVVAKVEKGKSK |
| | | KLKSVKELLGITIMERSSFEKNPIDFLEAKGYKEVKKDLIIKLPKYSLFELENGR |
| | | KRMLASAGELQKGNELALPSKYVNFLYLASHYEKLKGSPEDNEQKQLFVEQHK |
| | | HYLDEIIEQISEFSKRVILADANLDKVLSAYNKHRDKPIREQAENIIHLFTLTNL |
| | | GAPAAFKYFDTTIDRKRYTSTKEVLDATLIHQSITGLYETRIDLSQLGGDSGSET |
| | | PGTSESATPESTGNKKLEAVGTGIEPKAMSQGLVTFGDVAVDFSQEEWEWLN |
| | | PIQRNLYRKVMLENYRNLASLGLCVSKPDVISSLEQGKEPWSADYKDDDDKA |
| | | PKKKRKVPKKKRKV |
| 1753 | Fusion Protein | ATGCCAAAAAAGAAGAGAAAGGTACCGAAGAAAAAAAGAAAGGTATAC |
| | 8 DNA Sequence | AACCATGACCAGGAATTCGACCCCCCAAAGGTTTACCCACCTGTGCCAGC |
| | | TGAGAAGAGGAAGCCCATCCGCGTGCTGTCTCTCTTTGATGGGATTGCTA |
| | | CAGGGCTCCTGGTGCTGAAGGACCTGGGCATCCAAGTGGACCGCTACAT |
| | | TGCCTCCGAGGTGTGTGAGGACTCCATCACGGTGGGCATGGTGCGGCAC |
| | | CAGGGAAAGATCATGTACGTCGGGGACGTCCGCAGCGTCACACAGAAGC |
| | | ATATCCAGGAGTGGGGCCCATTCGACCTGGTGATTGGAGGCAGTCCCTG |
| | | CAATGACCTCTCCATTGTCAACCCTGCCCGCAAGGGACTTTATGAGGGTA |
| | | CTGGCCGCCTCTTCTTTGAGTTCTACCGCCTCCTGCATGATGCGCGGCCCA |
| | | AGGAGGGAGATGATCGCCCCTTCTTCTGGCTCTTTGAGAATGTGGTGGCC |
| | | ATGGGCGTTAGTGACAAGAGGGACATCTCGCGATTTCTTGAGTCTAACCC |
| | | CGTGATGATTGACGCCAAAGAAGTGTCTGCTGCACACAGGGCCCGTTAC |
| | | TTCTGGGGTAACCTTCCTGGCATGAACAGGCCTTTGGCATCCACTGTGAA |
| | | TGATAAGCTGGAGCTGCAAGAGTGTCTGGAGCACGGCAGAATAGCCAA |
| | | GTTCAGCAAAGTGAGGACCATTACCACCAGGTCAAACTCTATAAAGCAG |
| | | GGCAAAGACCAGCATTTCCCCGTCTTCATGAACGAGAAGGAGGACATCC |
| | | TGTGGTGCACTGAAATGGAAAGGGTGTTTGGCTTCCCCGTCCACTACACA |
| | | GACGTCTCCAACATGAGCCGCTTGGCGAGGCAGAGACTGCTGGGCCGAT |
| | | CGTGGAGCGTGCCGGTCATCCGCCACCTCTTCGCTCCGCTGAAGGAATAT |
| | | TTTGCTTGTGTGTCTAGCGGCAATAGTAACGCTAACAGCCGCGGGCCGA |
| | | GCTTCAGCAGCGGCCTGGTGCCGTTAAGCTTGCGCGGCAGCCATATGGG |
| | | CCCTATGGAGATATACAAGACAGTGTCTGCATGGAAGAGACAGCCAGTG |
| | | CGGGTACTGAGCCTCTTCAGAAACATCGACAAGGTACTAAAGAGTTTGG |
| | | GCTTCTTGGAAAGCGGTTCTGGTTCTGGGGGAGGAACGCTGAAGTACGT |
| | | GGAAGATGTCACAAATGTCGTGAGGAGAGACGTGGAGAAATGGGGCCC |
| | | CTTTGACCTGGTGTACGGCTCGACGCAGCCCCTAGGCAGCTCTTGTGATC |
| | | GCTGTCCCGGCTGGTACATGTTCCAGTTCCACCGGATCCTGCAGTATGCG |
| | | CTGCCTCGCCAGGAGAGTCAGCGGCCCTTCTTCTGGATATTCATGGACAA |
| | | TCTGCTGCTGACTGAGGATGACCAAGAGACAACTACCCGCTTCCTTCAGA |
| | | CAGAGGCTGTGACCCTCCAGGATGTCCGTGGCAGAGACTACCAGAATGC |
| | | TATGCGGGTGTGGAGCAACATTCCAGGGCTGAAGAGCAAGCATGCGCCC |
| | | CTGACCCCAAAGGAAGAAGAGTATCTGCAAGCCCAAGTCAGAAGCAGGA |
| | | GCAAGCTGGACGCCCCGAAAGTTGACCTCCTGGTGAAGAACTGCCTTCTC |
| | | CCGCTGAGAGAGTACTTCAAGTATTTTTCTCAAAACTCACTTCCTCTTGGA |
| | | GGGCCGAGCTCTGGCGCACCCCCACCAAGTGGAGGGTCTCCTGCCGGGT |
| | | CCCCAACATCTACTGAAGAAGGCACCAGCGAATCCGCAACGCCCGAGTC |
| | | AGGCCCTGGTACCTCCACAGAACCATCTGAAGGTAGTGCGCCTGGTTCCC |
| | | CAGCTGGAAGCCCTACTTCCACCGAAGAAGGCACGTCAACCGAACCAAG |
| | | TGAAGGATCTGCCCCTGGGACCAGCACTGAACCATCTGAGATGGACAAG |
| | | AAGTACAGCATCGGCCTGGCCATCGGCACCAACTCTGTGGGCTGGGCCG |
| | | TGATCACCGACGAGTACAAGGTGCCCAGCAAGAAATTCAAGGTGCTGGG |
| | | CAACACCGACCGGCACAGCATCAAGAAGAACCTGATCGGCGCCCTGCTG |
| | | TTCGACAGCGGAGAAACAGCCGAGGCCACCCGGCTGAAGAGAACCGCC |
| | | AGAAGAAGATACACCAGACGGAAGAACCGGATCTGCTATCTGCAAGAGA |
| | | TCTTCAGCAACGAGATGGCCAAGGTGGACGACAGCTTCTTCCACAGACTG |
| | | GAAGAGTCCTTCCTGGTGGAAGAGGATAAGAAGCACGAGCGGCACCCC |
| | | ATCTTCGGCAACATCGTGGACGAGGTGGCCTACCACGAGAAGTACCCCA |
| | | CCATCTACCACCTGAGAAAGAAACTGGTGGACAGCACCGACAAGGCCGA |
| | | CCTGCGGCTGATCTATCTGGCCCTGGCCCACATGATCAAGTTCCGGGGCC |
| | | ACTTCCTGATCGAGGGCGACCTGAACCCCGACAACAGCGACGTGGACAA |
| | | GCTGTTCATCCAGCTGGTGCAGACCTACAACCAGCTGTTCGAGGAAAACC |
| | | CCATCAACGCCAGCGGCGTGGACGCCAAGGCCATCCTGTCTGCCAGACT |
| | | GAGCAAGAGCAGACGGCTGGAAAATCTGATCGCCCAGCTGCCCGGCGA |
| | | GAAGAAGAATGGCCTGTTCGGCAACCTGATTGCCCTGAGCCTGGGCCTG |
| | | ACCCCCAACTTCAAGAGCAACTTCGACCTGGCCGAGGATGCCAAACTGCA |
| | | GCTGAGCAAGGACACCTACGACGACGACCTGGACAACCTGCTGGCCCAG |
| | | ATCGGCGACCAGTACGCCGACCTGTTTCTGGCCGCCAAGAACCTGTCCGA |
| | | CGCCATCCTGCTGAGCGACATCCTGAGAGTGAACACCGAGATCACCAAG |
| | | GCCCCCCTGAGCGCCTCTATGATCAAGAGATACGACGAGCACCACCAGG |
| | | ACCTGACCCTGCTGAAAGCTCTCGTGCGGCAGCAGCTGCCTGAGAAGTA |
| | | CAAAGAGATTTTCTTCGACCAGAGCAAGAACGGCTACGCCGGCTACATC |
| | | GATGGCGGAGCCAGCCAGGAAGAGTTCTACAAGTTCATCAAGCCCATCC |
| | | TGGAAAAGATGGACGGCACCGAGGAACTGCTCGTGAAGCTGAACAGAG |
| | | AGGACCTGCTGCGGAAGCAGCGGACCTTCGACAACGGCAGCATCCCCCA |
| | | CCAGATCCACCTGGGAGAGCTGCACGCCATTCTGCGGCGGCAGGAAGAT |
| | | TTTTACCCATTCCTGAAGGACAACCGGGAAAAGATCGAGAAGATCCTGAC |
| | | CTTCCGCATCCCCTACTACGTGGGCCCTCTGGCCAGGGGAAACAGCAGAT |
| | | TCGCCTGGATGACCAGAAAGAGCGAGGAAACCATCACCCCCTGGAACTT |
| | | CGAGGAAGTGGTGGACAAGGGCGCCAGCGCCCAGAGCTTCATCGAGCG |
| | | GATGACCAACTTCGATAAGAACCTGCCCAACGAGAAGGTGCTGCCCAAG |
| | | CACAGCCTGCTGTACGAGTACTTCACCGTGTACAACGAGCTGACCAAAGT |
| | | GAAATACGTGACCGAGGGAATGAGAAAGCCCGCCTTCCTGAGCGGCGA |
| | | GCAGAAAAAAGCCATCGTGGACCTGCTGTTCAAGACCAACCGGAAAGTG |
| | | ACCGTGAAGCAGCTGAAAGAGGACTACTTCAAGAAAATCGAGTGCTTCG |
| | | ACTCCGTGGAAATCTCCGGCGTGGAAGATCGGTTCAACGCCTCCCTGGG |
| | | CACATACCACGATCTGCTGAAAATTATCAAGGACAAGGACTTCCTGGACA |
| | | ATGAGGAAAACGAGGACATTCTGGAAGATATCGTGCTGACCCTGACACT |
| | | GTTTGAGGACAGAGAGATGATCGAGGAACGGCTGAAAACCTATGCCCAC |
| | | CTGTTCGACGACAAAGTGATGAAGCAGCTGAAGCGGCGGAGATACACCG |
| | | GCTGGGGCAGGCTGAGCCGGAAGCTGATCAACGGCATCCGGGACAAGC |
| | | AGTCCGGCAAGACAATCCTGGATTTCCTGAAGTCCGACGGCTTCGCCAAC |
| | | AGAAACTTCATGCAGCTGATCCACGACGACAGCCTGACCTTTAAAGAGG |
| | | ACATCCAGAAAGCCCAGGTGTCCGGCCAGGGCGATAGCCTGCACGAGCA |
| | | CATTGCCAATCTGGCCGGCAGCCCCGCCATTAAGAAGGGCATCCTGCAG |
| | | ACAGTGAAGGTGGTGGACGAGCTCGTGAAAGTGATGGGCCGGCACAAG |
| | | CCCGAGAACATCGTGATCGAAATGGCCAGAGAGAACCAGACCACCCAGA |
| | | AGGGACAGAAGAACAGCCGCGAGAGAATGAAGCGGATCGAAGAGGGC |
| | | ATCAAAGAGCTGGGCAGCCAGATCCTGAAAGAACACCCCGTGGAAAACA |
| | | CCCAGCTGCAGAACGAGAAGCTGTACCTGTACTACCTGCAGAATGGGCG |
| | | GGATATGTACGTGGACCAGGAACTGGACATCAACCGGCTGTCCGACTAC |
| | | GATGTGGACGCTATCGTGCCTCAGAGCTTTCTGAAGGACGACTCCATCGA |
| | | TAACAAAGTGCTGACTCGGAGCGACAAGAACCGGGGCAAGAGCGACAA |
| | | CGTGCCCTCCGAAGAGGTCGTGAAGAAGATGAAGAACTACTGGCGCCAG |
| | | CTGCTGAATGCCAAGCTGATTACCCAGAGGAAGTTCGACAATCTGACCAA |
| | | GGCCGAGAGAGGCGGCCTGAGCGAACTGGATAAGGCCGGCTTCATCAA |
| | | GAGACAGCTGGTGGAAACCCGGCAGATCACAAAGCACGTGGCACAGAT |
| | | CCTGGACTCCCGGATGAACACTAAGTACGACGAGAACGACAAACTGATC |
| | | CGGGAAGTGAAAGTGATCACCCTGAAGTCCAAGCTGGTGTCCGATTTCC |
| | | GGAAGGATTTCCAGTTTTACAAAGTGCGCGAGATCAACAACTACCACCAC |
| | | GCCCACGACGCCTACCTGAACGCCGTCGTGGGAACCGCCCTGATCAAAA |
| | | AGTACCCTAAGCTGGAAAGCGAGTTCGTGTACGGCGACTACAAGGTGTA |
| | | CGACGTGCGGAAGATGATCGCCAAGAGCGAGCAGGAAATCGGCAAGGC |
| | | TACCGCCAAGTACTTCTTCTACAGCAACATCATGAACTTTTTCAAGACCGA |
| | | GATTACCCTGGCCAACGGCGAGATCCGGAAGCGGCCTCTGATCGAGACA |
| | | AACGGCGAAACAGGCGAGATCGTGTGGGATAAGGGCCGGGACTTTGCC |
| | | ACCGTGCGGAAAGTGCTGTCTATGCCCCAAGTGAATATCGTGAAAAAGA |
| | | CCGAGGTGCAGACAGGCGGCTTCAGCAAAGAGTCTATCCTGCCCAAGAG |
| | | GAACAGCGACAAGCTGATCGCCAGAAAGAAGGACTGGGACCCTAAGAA |
| | | GTACGGCGGCTTCGACAGCCCCACCGTGGCCTATTCTGTGCTGGTGGTG |
| | | GCCAAAGTGGAAAAGGGCAAGTCCAAGAAACTGAAGAGTGTGAAAGAG |
| | | CTGCTGGGGATCACCATCATGGAAAGAAGCAGCTTCGAGAAGAATCCCA |
| | | TCGACTTTCTGGAAGCCAAGGGCTACAAAGAAGTGAAAAAGGACCTGAT |
| | | CATCAAGCTGCCTAAGTACTCCCTGTTCGAGCTGGAAAACGGCCGGAAG |
| | | AGAATGCTGGCCTCTGCCGGCGAACTGCAGAAGGGAAACGAACTGGCCC |
| | | TGCCCTCCAAATATGTGAACTTCCTGTACCTGGCCAGCCACTATGAGAAG |
| | | CTGAAGGGCTCCCCCGAGGATAATGAGCAGAAACAGCTGTTTGTGGAAC |
| | | AGCACAAACACTACCTGGACGAGATCATCGAGCAGATCAGCGAGTTCTC |
| | | CAAGAGAGTGATCCTGGCCGACGCTAATCTGGACAAGGTGCTGAGCGCC |
| | | TACAACAAGCACAGAGACAAGCCTATCAGAGAGCAGGCCGAGAATATCA |
| | | TCCACCTGTTTACCCTGACCAATCTGGGAGCCCCTGCCGCCTTCAAGTACT |
| | | TTGACACCACCATCGACCGGAAGAGGTACACCAGCACCAAAGAGGTGCT |
| | | GGACGCCACCCTGATCCACCAGAGCATCACCGGCCTGTACGAGACACGG |
| | | ATCGACCTGTCTCAGCTGGGAGGCGACAGCGGAAGTGAGACCCCAGGTA |
| | | CATCCGAATCAGCAACGCCTGAAAGCACCGGTAACAAAAAGCTTGAGGC |
| | | CGTCGGAACCGGAATCGAACCAAAAGCAATGTCCCAGGGTTTGGTGACA |
| | | TTTGGCGACGTGGCTGTCGATTTTTCCCAGGAAGAGTGGGAGTGGCTCA |
| | | ATCCTATCCAGAGGAACTTGTACCGGAAGGTGATGCTGGAGAATTATAG |
| | | AAATTTGGCATCACTGGGGTTGTGCGTTAGCAAACCAGATGTTATATCTT |
| | | CCCTGGAACAGGGAAAGGAGCCCTGGAGCGCTGATTACAAAGATGATG |
| | | ACGATAAAGCCCCAAAAAAGAAGAGAAAGGTACCGAAGAAAAAAAGAA |
| | | AGGTC |
| 1754 | Fusion Protein | MPKKKRKVPKKKRKVYNHDQEFDPPKVYPPVPAEKRKPIRVLSLFDGIATGLL |
| | 9 Amino Acid | VLKDLGIQVDRYIASEVCEDSITVGMVRHQGKIMYVGDVRSVTQKHIQEWG |
| | Sequence | PFDLVIGGSPCNDLSIVNPARKGLYEGTGRLFFEFYRLLHDARPKEGDDRPFF |
| | NLS-NLS-3A-ADD- | WLFENVVAMGVSDKRDISRFLESNPVMIDAKEVSAAHRARYFWGNLPGM |
| | h3L-dCas9- | NRPLASTVNDKLELQECLEHGRIAKFSKVRTITTRSNSIKQGKDQHFPVFMNE |
| | KOX1KRAB-NLS- | KEDILWCTEMERVFGFPVHYTDVSNMSRLARQRLLGRSWSVPVIRHLFAPL |
| | NLS | KEYFACVSSGNSNANSRGPSFSSGLVPLSLRGSHMAAIPALDPEAEPSMDVIL |
| | | VGSSELSSSVSPGTGRDLIAYEVKANQRNIEDICICCGSLQVHTQHPLFEGGIC |
| | | APCKDKFLDALFLYDDDGYQSYCSICCSGETLLICGNPDCTRCYCFECVDSLVG |
| | | PGTSGKVHAMSNWVCYLCLPSSRSGLLQRRRKWRSQLKAFYDRESENPLE |
| | | MFETVPVWRRQPVRVLSLFEDIKKELTSLGFLESGSDPGQLKHVVDVTDTVR |
| | | KDVEEWGPFDLVYGATPPLGHTCDRPPSWYLFQFHRLLQYARPKPGSPRPF |
| | | FWMFVDNLVLNKEDLDVASRFLEMEPVTIPDVHGGSLQNAVRVWSNIPAIR |
| | | SRHWALVSEEELSLLAQNKQSSKLAAKWPTKLVKNCFLPLREYFKYFSTELTSS |
| | | PGGPSSGAPPPSGGSPAGSPTSTEEGTSESATPESGPGTSTEPSEGSAPGSPA |
| | | GSPTSTEEGTSTEPSEGSAPGTSTEPSELEDKKYSIGLAIGTNSVGWAVITDEY |
| | | KVPSKKFKVLGNTDRHSIKKNLIGALLFDSGETAEATRLKRTARRRYTRRKNRI |
| | | CYLQEIFSNEMAKVDDSFFHRLEESFLVEEDKKHERHPIFGNIVDEVAYHEKY |
| | | PTIYHLRKKLVDSTDKADLRLIYLALAHMIKFRGHFLIEGDLNPDNSDVDKLFI |
| | | QLVQTYNQLFEENPINASGVDAKAILSARLSKSRRLENLIAQLPGEKKNGLFG |
| | | NLIALSLGLTPNFKSNFDLAEDAKLQLSKDTYDDDLDNLLAQIGDQYADLFLA |
| | | AKNLSDAILLSDILRVNTEITKAPLSASMIKRYDEHHQDLTLLKALVRQQLPEK |
| | | YKEIFFDQSKNGYAGYIDGGASQEEFYKFIKPILEKMDGTEELLVKLNREDLLR |
| | | KQRTFDNGSIPHQIHLGELHAILRRQEDFYPFLKDNREKIEKILTFRIPYYVGPL |
| | | ARGNSRFAWMTRKSEETITPWNFEEVVDKGASAQSFIERMTNFDKNLPNE |
| | | KVLPKHSLLYEYFTVYNELTKVKYVTEGMRKPAFLSGEQKKAIVDLLFKTNRKV |
| | | TVKQLKEDYFKKIECFDSVEISGVEDRFNASLGTYHDLLKIIKDKDFLDNEENE |
| | | DILEDIVLTLTLFEDREMIEERLKTYAHLFDDKVMKQLKRRRYTGWGRLSRKLI |
| | | NGIRDKQSGKTILDFLKSDGFANRNFMQLIHDDSLTFKEDIQKAQVSGQGDS |
| | | LHEHIANLAGSPAIKKGILQTVKVVDELVKVMGRHKPENIVIEMARENQTTQ |
| | | KGQKNSRERMKRIEEGIKELGSQILKEHPVENTQLQNEKLYLYYLQNGRDMY |
| | | VDQELDINRLSDYDVDAIVPQSFLKDDSIDNKVLTRSDKNRGKSDNVPSEEV |
| | | VKKMKNYWRQLLNAKLITQRKFDNLTKAERGGLSELDKAGFIKRQLVETRQI |
| | | TKHVAQILDSRMNTKYDENDKLIREVKVITLKSKLVSDFRKDFQFYKVREINNY |
| | | HHAHDAYLNAVVGTALIKKYPKLESEFVYGDYKVYDVRKMIAKSEQEIGKAT |
| | | AKYFFYSNIMNFFKTEITLANGEIRKRPLIETNGETGEIVWDKGRDFATVRKVL |
| | | SMPQVNIVKKTEVQTGGFSKESILPKRNSDKLIARKKDWDPKKYGGFDSPTV |
| | | AYSVLVVAKVEKGKSKKLKSVKELLGITIMERSSFEKNPIDFLEAKGYKEVKKDL |
| | | IIKLPKYSLFELENGRKRMLASAGELQKGNELALPSKYVNFLYLASHYEKLKGS |
| | | PEDNEQKQLFVEQHKHYLDEIIEQISEFSKRVILADANLDKVLSAYNKHRDKPI |
| | | REQAENIIHLFTLTNLGAPAAFKYFDTTIDRKRYTSTKEVLDATLIHQSITGLYE |
| | | TRIDLSQLGGDSPKKKRKVGVDGSSGSETPGTSESATPESRTLVTFKDVFVDFT |
| | | REEWKLLDTAQQIVYRNVMLENYKNLVSLGYQLTKPDVILRLEKGEEPSADY |
| | | KDDDDKAPKKKRKVPKKKRKV |
| 1755 | Fusion Protein | ATGGGTACCATGCCAAAAAAGAAGAGAAAGGTACCGAAGAAAAAAAGA |
| | 9 DNA Sequence | AAGGTATACAATCACGATCAGGAGTTCGACCCCCCTAAGGTGTACCCACC |
| | | AGTGCCTGCAGAGAAGAGGAAGCCAATCCGGGTGCTGAGCCTGTTTGAT |
| | | GGCATCGCCACCGGCCTGCTGGTGCTGAAGGATCTGGGCATCCAGGTGG |
| | | ACCGGTACATCGCCTCCGAGGTGTGCGAGGATTCTATCACCGTGGGCAT |
| | | GGTGCGCCACCAGGGCAAGATCATGTATGTGGGCGACGTGCGGTCCGTG |
| | | ACACAGAAGCACATCCAGGAGTGGGGCCCATTCGATCTGGTGATCGGCG |
| | | GCAGCCCCTGTAATGACCTGTCCATCGTGAACCCTGCAAGGAAGGGACT |
| | | GTACGAGGGAACCGGCCGGCTGTTCTTTGAGTTTTATAGACTGCTGCACG |
| | | ACGCCAGGCCTAAGGAGGGCGACGATAGACCATTCTTTTGGCTGTTCGA |
| | | GAATGTGGTGGCTATGGGCGTGAGCGATAAGAGGGACATCTCCAGGTTT |
| | | CTGGAGTCTAACCCCGTGATGATCGATGCAAAGGAGGTGTCCGCCGCAC |
| | | ACAGAGCCAGGTATTTCTGGGGCAATCTGCCAGGAATGAACAGGCCACT |
| | | GGCAAGCACCGTGAATGACAAGCTGGAGCTGCAGGAGTGCCTGGAGCA |
| | | CGGAAGGATCGCCAAGTTTTCCAAGGTGCGCACAATCACCACACGGAGC |
| | | AATTCCATCAAGCAGGGCAAGGATCAGCACTTCCCCGTGTTCATGAACGA |
| | | GAAGGAGGACATCCTGTGGTGTACCGAGATGGAGAGAGTGTTCGGCTTT |
| | | CCAGTGCACTACACAGACGTGTCTAACATGAGCAGGCTGGCAAGGCAGC |
| | | GGCTGCTGGGCAGATCTTGGAGCGTGCCCGTGATCAGGCACCTGTTCGC |
| | | CCCTCTGAAGGAGTATTTTGCCTGCGTGAGCAGCGGCAACTCCAATGCCA |
| | | ACAGCCGGGGCCCCTCTTTCAGCTCCGGATTGGTGCCTCTGAGCCTGAGG |
| | | GGCTCCCACATGGCAGCAATCCCCGCCCTGGACCCCGAGGCCGAGCCTA |
| | | GCATGGACGTGATCCTGGTGGGCTCTAGCGAGCTGTCCTCTAGCGTGTCT |
| | | CCAGGAACCGGAAGGGATCTGATCGCATACGAGGTGAAGGCCAATCAG |
| | | CGGAACATCGAGGACATCTGTATCTGCTGTGGCAGCCTGCAGGTGCACA |
| | | CACAGCACCCACTGTTCGAGGGAGGAATCTGCGCACCCTGTAAGGATAA |
| | | GTTCCTGGACGCCCTGTTTCTGTACGACGATGACGGCTACCAGTCCTATT |
| | | GCTCTATCTGCTGTTCCGGCGAGACCCTGCTGATCTGCGGCAATCCAGAT |
| | | TGTACAAGGTGCTATTGTTTTGAGTGCGTGGACTCTCTGGTGGGACCAGG |
| | | CACCAGCGGAAAGGTGCACGCCATGTCCAACTGGGTGTGCTACCTGTGC |
| | | CTGCCATCCTCTCGCAGCGGACTGCTGCAGCGGAGAAGGAAGTGGAGAT |
| | | CCCAGCTGAAGGCCTTCTATGATAGGGAGTCTGAGAACCCCCTGGAGAT |
| | | GTTTGAGACCGTGCCAGTGTGGCGCCGGCAGCCCGTGAGGGTGCTGAGC |
| | | CTGTTCGAGGATATCAAGAAGGAGCTGACATCCCTGGGCTTTCTGGAGTC |
| | | CGGCTCTGACCCCGGACAGCTGAAGCACGTGGTGGATGTGACCGACACA |
| | | GTGCGGAAGGATGTGGAGGAGTGGGGCCCTTTCGACCTGGTGTACGGA |
| | | GCAACCCCTCCACTGGGACACACATGCGACAGACCCCCTTCTTGGTACCT |
| | | GTTCCAGTTTCACCGCCTGCTGCAGTATGCAAGGCCAAAGCCAGGCAGCC |
| | | CTAGACCATTCTTTTGGATGTTCGTGGATAATCTGGTGCTGAACAAGGAG |
| | | GATCTGGACGTGGCCAGCAGGTTTCTGGAGATGGAGCCAGTGACCATCC |
| | | CAGACGTGCACGGCGGCTCCCTGCAGAATGCCGTGCGCGTGTGGTCTAA |
| | | CATCCCTGCCATCAGAAGCAGGCACTGGGCACTGGTGAGCGAGGAGGA |
| | | GCTGTCCCTGCTGGCCCAGAATAAGCAGAGCAGCAAGCTGGCCGCCAAG |
| | | TGGCCTACAAAGCTGGTGAAGAACTGCTTCCTGCCACTGCGGGAGTACTT |
| | | CAAGTATTTTTCCACCGAGCTGACATCTAGCCTGGGAGGACCCTCCTCTG |
| | | GCGCCCCACCACCTAGCGGCGGCTCCCCTGCCGGCTCTCCAACCAGCACA |
| | | GAGGAGGGCACCAGCGAGTCCGCCACACCAGAGTCTGGACCTGGCACCA |
| | | GCACAGAGCCATCCGAGGGCTCTGCCCCAGGCTCTCCTGCAGGCAGCCC |
| | | TACCTCCACCGAAGAGGGCACCAGCACAGAGCCTTCTGAGGGCAGCGCC |
| | | CCAGGCACCTCTACAGAGCCAAGCGAGCTCGAGGACAAGAAGTACAGCA |
| | | TCGGCCTGGCCATCGGCACCAACTCTGTGGGCTGGGCCGTGATCACCGA |
| | | CGAGTACAAGGTGCCCAGCAAGAAATTCAAGGTGCTGGGCAACACCGAC |
| | | CGGCACAGCATCAAGAAGAACCTGATCGGAGCCCTGCTGTTCGACAGCG |
| | | GCGAAACAGCCGAGGCCACCCGGCTGAAGAGAACCGCCAGAAGAAGAT |
| | | ACACCAGACGGAAGAACCGGATCTGCTATCTGCAAGAGATCTTCAGCAA |
| | | CGAGATGGCCAAGGTGGACGACAGCTTCTTCCACAGACTGGAAGAGTCC |
| | | TTCCTGGTGGAAGAGGATAAGAAGCACGAGCGGCACCCCATCTTCGGCA |
| | | ACATCGTGGACGAGGTGGCCTACCACGAGAAGTACCCCACCATCTACCAC |
| | | CTGAGAAAGAAACTGGTGGACAGCACCGACAAGGCCGACCTGCGGCTG |
| | | ATCTATCTGGCCCTGGCCCACATGATCAAGTTCCGGGGCCACTTCCTGAT |
| | | CGAGGGCGACCTGAACCCCGACAACAGCGACGTGGACAAGCTGTTCATC |
| | | CAGCTGGTGCAGACCTACAACCAGCTGTTCGAGGAAAACCCCATCAACG |
| | | CCAGCGGCGTGGACGCCAAGGCCATCCTGTCTGCCAGACTGAGCAAGAG |
| | | CAGACGGCTGGAAAATCTGATCGCCCAGCTGCCCGGCGAGAAGAAGAAT |
| | | GGCCTGTTCGGCAACCTGATTGCCCTGAGCCTGGGCCTGACCCCCAACTT |
| | | CAAGAGCAACTTCGACCTGGCCGAGGATGCCAAACTGCAGCTGAGCAAG |
| | | GACACCTACGACGACGACCTGGACAACCTGCTGGCCCAGATCGGCGACC |
| | | AGTACGCCGACCTGTTTCTGGCCGCCAAGAACCTGTCCGACGCCATCCTG |
| | | CTGAGCGACATCCTGAGAGTGAACACCGAGATCACCAAGGCCCCCCTGA |
| | | GCGCCTCTATGATCAAGAGATACGACGAGCACCACCAGGACCTGACCCT |
| | | GCTGAAAGCTCTCGTGCGGCAGCAGCTGCCTGAGAAGTACAAAGAGATT |
| | | TTCTTCGACCAGAGCAAGAACGGCTACGCCGGCTACATTGACGGCGGAG |
| | | CCAGCCAGGAAGAGTTCTACAAGTTCATCAAGCCCATCCTGGAAAAGAT |
| | | GGACGGCACCGAGGAACTGCTCGTGAAGCTGAACAGAGAGGACCTGCT |
| | | GCGGAAGCAGCGGACCTTCGACAACGGCAGCATCCCCCACCAGATCCAC |
| | | CTGGGAGAGCTGCACGCCATTCTGCGGCGGCAGGAAGATTTTTACCCATT |
| | | CCTGAAGGACAACCGGGAAAAGATCGAGAAGATCCTGACCTTCCGCATC |
| | | CCCTACTACGTGGGCCCTCTGGCCAGGGGAAACAGCAGATTCGCCTGGA |
| | | TGACCAGAAAGAGCGAGGAAACCATCACCCCCTGGAACTTCGAGGAAGT |
| | | GGTGGACAAGGGCGCTTCCGCCCAGAGCTTCATCGAGCGGATGACCAAC |
| | | TTCGATAAGAACCTGCCCAACGAGAAGGTGCTGCCCAAGCACAGCCTGC |
| | | TGTACGAGTACTTCACCGTGTATAACGAGCTGACCAAAGTGAAATACGTG |
| | | ACCGAGGGAATGAGAAAGCCCGCCTTCCTGAGCGGCGAGCAGAAAAAG |
| | | GCCATCGTGGACCTGCTGTTCAAGACCAACCGGAAAGTGACCGTGAAGC |
| | | AGCTGAAAGAGGACTACTTCAAGAAAATCGAGTGCTTCGACTCCGTGGA |
| | | AATCTCCGGCGTGGAAGATCGGTTCAACGCCTCCCTGGGCACATACCACG |
| | | ATCTGCTGAAAATTATCAAGGACAAGGACTTCCTGGACAATGAGGAAAA |
| | | CGAGGACATTCTGGAAGATATCGTGCTGACCCTGACACTGTTTGAGGAC |
| | | AGAGAGATGATCGAGGAACGGCTGAAAACCTATGCCCACCTGTTCGACG |
| | | ACAAAGTGATGAAGCAGCTGAAGCGGCGGAGATACACCGGCTGGGGCA |
| | | GGCTGAGCCGGAAGCTGATCAACGGCATCCGGGACAAGCAGTCCGGCA |
| | | AGACAATCCTGGATTTCCTGAAGTCCGACGGCTTCGCCAACAGAAACTTC |
| | | ATGCAGCTGATCCACGACGACAGCCTGACCTTTAAAGAGGACATCCAGA |
| | | AAGCCCAGGTGTCCGGCCAGGGCGATAGCCTGCACGAGCACATTGCCAA |
| | | TCTGGCCGGCAGCCCCGCCATTAAGAAGGGCATCCTGCAGACAGTGAAG |
| | | GTGGTGGACGAGCTCGTGAAAGTGATGGGCCGGCACAAGCCCGAGAAC |
| | | ATCGTGATCGAAATGGCCAGAGAGAACCAGACCACCCAGAAGGGACAG |
| | | AAGAACAGCCGCGAGAGAATGAAGCGGATCGAAGAGGGCATCAAAGAG |
| | | CTGGGCAGCCAGATCCTGAAAGAACACCCCGTGGAAAACACCCAGCTGC |
| | | AGAACGAGAAGCTGTACCTGTACTACCTGCAGAATGGGGGGATATGTA |
| | | CGTGGACCAGGAACTGGACATCAACCGGCTGTCCGACTACGATGTGGAC |
| | | GCCATCGTGCCTCAGAGCTTTCTGAAGGACGACTCCATCGACAACAAGGT |
| | | GCTGACCAGAAGCGACAAGAACCGGGGCAAGAGCGACAACGTGCCCTC |
| | | CGAAGAGGTCGTGAAGAAGATGAAGAACTACTGGCGGCAGCTGCTGAA |
| | | CGCCAAGCTGATTACCCAGAGAAAGTTCGACAATCTGACCAAGGCCGAG |
| | | AGAGGCGGCCTGAGCGAACTGGATAAGGCCGGCTTCATCAAGAGACAG |
| | | CTGGTGGAAACCCGGCAGATCACAAAGCACGTGGCACAGATCCTGGACT |
| | | CCCGGATGAACACTAAGTACGACGAGAATGACAAGCTGATCCGGGAAGT |
| | | GAAAGTGATCACCCTGAAGTCCAAGCTGGTGTCCGATTTCCGGAAGGAT |
| | | TTCCAGTTTTACAAAGTGCGCGAGATCAACAACTACCACCACGCCCACGA |
| | | CGCCTACCTGAACGCCGTCGTGGGAACCGCCCTGATCAAAAAGTACCCTA |
| | | AGCTGGAAAGCGAGTTCGTGTACGGCGACTACAAGGTGTACGACGTGCG |
| | | GAAGATGATCGCCAAGAGCGAGCAGGAAATCGGCAAGGCTACCGCCAA |
| | | GTACTTCTTCTACAGCAACATCATGAACTTTTTCAAGACCGAGATTACCCT |
| | | GGCCAACGGCGAGATCCGGAAGCGGCCTCTGATCGAGACAAACGGCGA |
| | | AACCGGGGAGATCGTGTGGGATAAGGGCCGGGATTTTGCCACCGTGCG |
| | | GAAAGTGCTGAGCATGCCCCAAGTGAATATCGTGAAAAAGACCGAGGTG |
| | | CAGACAGGCGGCTTCAGCAAAGAGTCTATCCTGCCCAAGAGGAACAGCG |
| | | ATAAGCTGATCGCCAGAAAGAAGGACTGGGACCCTAAGAAGTACGGCG |
| | | GCTTCGACAGCCCCACCGTGGCCTATTCTGTGCTGGTGGTGGCCAAAGTG |
| | | GAAAAGGGCAAGTCCAAGAAACTGAAGAGTGTGAAAGAGCTGCTGGGG |
| | | ATCACCATCATGGAAAGAAGCAGCTTCGAGAAGAATCCCATCGACTTTCT |
| | | GGAAGCCAAGGGCTACAAAGAAGTGAAAAAGGACCTGATCATCAAGCT |
| | | GCCTAAGTACTCCCTGTTCGAGCTGGAAAACGGCCGGAAGAGAATGCTG |
| | | GCCTCTGCCGGCGAACTGCAGAAGGGAAACGAACTGGCCCTGCCCTCCA |
| | | AATATGTGAACTTCCTGTACCTGGCCAGCCACTATGAGAAGCTGAAGGGC |
| | | TCCCCCGAGGATAATGAGCAGAAACAGCTGTTTGTGGAACAGCACAAGC |
| | | ACTACCTGGACGAGATCATCGAGCAGATCAGCGAGTTCTCCAAGAGAGT |
| | | GATCCTGGCCGACGCTAATCTGGACAAAGTGCTGTCCGCCTACAACAAGC |
| | | ACCGGGATAAGCCCATCAGAGAGCAGGCCGAGAATATCATCCACCTGTT |
| | | TACCCTGACCAATCTGGGAGCCCCTGCCGCCTTCAAGTACTTTGACACCA |
| | | CCATCGACCGGAAGAGGTACACCAGCACCAAAGAGGTGCTGGACGCCAC |
| | | CCTGATCCACCAGAGCATCACCGGCCTGTACGAGACACGGATCGACCTGT |
| | | CTCAGCTGGGAGGCGACAGCCCCAAGAAGAAGAGAAAGGTGGGAGTCG |
| | | ACGGATCCAGCGGCTCCGAGACCCCAGGCACATCTGAGAGCGCCACCCC |
| | | TGAGTCCCGGACCCTGGTGACCTTCAAGGATGTATTTGTGGACTTCACCA |
| | | GGGAGGAGTGGAAGCTGCTGGACACTGCTCAGCAGATCGTGTACAGAA |
| | | ATGTGATGCTGGAGAACTATAAGAACCTGGTTTCCTTGGGTTATCAGCTT |
| | | ACTAAGCCAGATGTGATCCTCCGGTTGGAGAAGGGAGAAGAGCCCAGC |
| | | GCTGATTACAAAGATGATGACGATAAAGCCCCAAAAAAGAAGAGAAAG |
| | | GTACCGAAGAAAAAAAGAAAGGTCTGA |
| 1756 | Fusion Protein | MGTMPKKKRKVPKKKRKVYNHDQEFDPPKVYPPVPAEKRKPIRVLSLFDGIA |
| | 10 Amino Acid | TGLLVLKDLGIQVDRYIASEVCEDSITVGMVRHQGKIMYVGDVRSVTQKHIQ |
| | Sequence | EWGPFDLVIGGSPCNDLSIVNPARKGLYEGTGRLFFEFYRLLHDARPKEGDD |
| | NLS-NLS-3A-ADD- | RPFFWLFENVVAMGVSDKRDISRFLESNPVMIDAKEVSAAHRARYFWGNLP |
| | h3L-dCas9-ZFP- | GMNRPLASTVNDKLELQECLEHGRIAKFSKVRTITTRSNSIKQGKDQHFPVF |
| | 28-NLS-NLS | MNEKEDILWCTEMERVFGFPVHYTDVSNMSRLARQRLLGRSWSVPVIRHLF |
| | | APLKEYFACVSSGNSNANSRGPSFSSGLVPLSLRGSHMAAIPALDPEAEPSM |
| | | DVILVGSSELSSSVSPGTGRDLIAYEVKANQRNIEDICICCGSLQVHTQHPLFE |
| | | GGICAPCKDKFLDALFLYDDDGYQSYCSICCSGETLLICGNPDCTRCYCFECVD |
| | | SLVGPGTSGKVHAMSNWVCYLCLPSSRSGLLQRRRKWRSQLKAFYDRESEN |
| | | PLEMFETVPVWRRQPVRVLSLFEDIKKELTSLGFLESGSDPGQLKHVVDVTD |
| | | TVRKDVEEWGPFDLVYGATPPLGHTCDRPPSWYLFQFHRLLQYARPKPGSP |
| | | RPFFWMFVDNLVLNKEDLDVASRFLEMEPVTIPDVHGGSLQNAVRVWSNI |
| | | PAIRSRHWALVSEEELSLLAQNKQSSKLAAKWPTKLVKNCFLPLREYFKYFSTE |
| | | LTSSLGGPSSGAPPPSGGSPAGSPTSTEEGTSESATPESGPGTSTEPSEGSAPG |
| | | SPAGSPTSTEEGTSTEPSEGSAPGTSTEPSELEDKKYSIGLAIGTNSVGWAVIT |
| | | DEYKVPSKKFKVLGNTDRHSIKKNLIGALLFDSGETAEATRLKRTARRRYTRRK |
| | | NRICYLQEIFSNEMAKVDDSFFHRLEESFLVEEDKKHERHPIFGNIVDEVAYHE |
| | | KYPTIYHLRKKLVDSTDKADLRLIYLALAHMIKFRGHFLIEGDLNPDNSDVDKL |
| | | FIQLVQTYNQLFEENPINASGVDAKAILSARLSKSRRLENLIAQLPGEKKNGLF |
| | | GNLIALSLGLTPNFKSNFDLAEDAKLQLSKDTYDDDLDNLLAQIGDQYADLFL |
| | | AAKNLSDAILLSDILRVNTEITKAPLSASMIKRYDEHHQDLTLLKALVRQQLPE |
| | | KYKEIFFDQSKNGYAGYIDGGASQEEFYKFIKPILEKMDGTEELLVKLNREDLL |
| | | RKQRTFDNGSIPHQIHLGELHAILRRQEDFYPFLKDNREKIEKILTFRIPYYVGP |
| | | LARGNSRFAWMTRKSEETITPWNFEEVVDKGASAQSFIERMTNFDKNLPNE |
| | | KVLPKHSLLYEYFTVYNELTKVKYVTEGMRKPAFLSGEQKKAIVDLLFKTNRKV |
| | | TVKQLKEDYFKKIECFDSVEISGVEDRFNASLGTYHDLLKIIKDKDFLDNEENE |
| | | DILEDIVLTLTLFEDREMIEERLKTYAHLFDDKVMKQLKRRRYTGWGRLSRKLI |
| | | NGIRDKQSGKTILDFLKSDGFANRNFMQLIHDDSLTFKEDIQKAQVSGQGDS |
| | | LHEHIANLAGSPAIKKGILQTVKVVDELVKVMGRHKPENIVIEMARENQTTQ |
| | | KGQKNSRERMKRIEEGIKELGSQILKEHPVENTQLQNEKLYLYYLQNGRDMY |
| | | VDQELDINRLSDYDVDAIVPQSFLKDDSIDNKVLTRSDKNRGKSDNVPSEEV |
| | | VKKMKNYWRQLLNAKLITQRKFDNLTKAERGGLSELDKAGFIKRQLVETRQI |
| | | TKHVAQILDSRMNTKYDENDKLIREVKVITLKSKLVSDFRKDFQFYKVREINNY |
| | | HHAHDAYLNAVVGTALIKKYPKLESEFVYGDYKVYDVRKMIAKSEQEIGKAT |
| | | AKYFFYSNIMNFFKTEITLANGEIRKRPLIETNGETGEIVWDKGRDFATVRKVL |
| | | SMPQVNIVKKTEVQTGGFSKESILPKRNSDKLIARKKDWDPKKYGGFDSPTV |
| | | AYSVLVVAKVEKGKSKKLKSVKELLGITIMERSSFEKNPIDFLEAKGYKEVKKDL |
| | | IIKLPKYSLFELENGRKRMLASAGELQKGNELALPSKYVNFLYLASHYEKLKGS |
| | | PEDNEQKQLFVEQHKHYLDEIIEQISEFSKRVILADANLDKVLSAYNKHRDKPI |
| | | REQAENIIHLFTLTNLGAPAAFKYFDTTIDRKRYTSTKEVLDATLIHQSITGLYE |
| | | TRIDLSQLGGDSPKKKRKVGVDGSSGSETPGTSESATPESTGNKKLEAVGTGIE |
| | | PKAMSQGLVTFGDVAVDFSQEEWEWLNPIQRNLYRKVMLENYRNLASLGL |
| | | CVSKPDVISSLEQGKEPWSADYKDDDDKAPKKKRKVPKKKRKV |
| 1757 | Fusion Protein | ATGGGTACCATGCCAAAAAAGAAGAGAAAGGTACCGAAGAAAAAAAGA |
| | 10 DNA Sequence | AAGGTATACAATCACGATCAGGAGTTCGACCCCCCTAAGGTGTACCCACC |
| | | AGTGCCTGCAGAGAAGAGGAAGCCAATCCGGGTGCTGAGCCTGTTTGAT |
| | | GGCATCGCCACCGGCCTGCTGGTGCTGAAGGATCTGGGCATCCAGGTGG |
| | | ACCGGTACATCGCCTCCGAGGTGTGCGAGGATTCTATCACCGTGGGCAT |
| | | GGTGCGCCACCAGGGCAAGATCATGTATGTGGGCGACGTGCGGTCCGTG |
| | | ACACAGAAGCACATCCAGGAGTGGGGCCCATTCGATCTGGTGATCGGCG |
| | | GCAGCCCCTGTAATGACCTGTCCATCGTGAACCCTGCAAGGAAGGGACT |
| | | GTACGAGGGAACCGGCCGGCTGTTCTTTGAGTTTTATAGACTGCTGCACG |
| | | ACGCCAGGCCTAAGGAGGGCGACGATAGACCATTCTTTTGGCTGTTCGA |
| | | GAATGTGGTGGCTATGGGCGTGAGCGATAAGAGGGACATCTCCAGGTTT |
| | | CTGGAGTCTAACCCCGTGATGATCGATGCAAAGGAGGTGTCCGCCGCAC |
| | | ACAGAGCCAGGTATTTCTGGGGCAATCTGCCAGGAATGAACAGGCCACT |
| | | GGCAAGCACCGTGAATGACAAGCTGGAGCTGCAGGAGTGCCTGGAGCA |
| | | CGGAAGGATCGCCAAGTTTTCCAAGGTGCGCACAATCACCACACGGAGC |
| | | AATTCCATCAAGCAGGGCAAGGATCAGCACTTCCCCGTGTTCATGAACGA |
| | | GAAGGAGGACATCCTGTGGTGTACCGAGATGGAGAGAGTGTTCGGCTTT |
| | | CCAGTGCACTACACAGACGTGTCTAACATGAGCAGGCTGGCAAGGCAGC |
| | | GGCTGCTGGGCAGATCTTGGAGCGTGCCCGTGATCAGGCACCTGTTCGC |
| | | CCCTCTGAAGGAGTATTTTGCCTGCGTGAGCAGCGGCAACTCCAATGCCA |
| | | ACAGCCGGGGCCCCTCTTTCAGCTCCGGATTGGTGCCTCTGAGCCTGAGG |
| | | GGCTCCCACATGGCAGCAATCCCCGCCCTGGACCCCGAGGCCGAGCCTA |
| | | GCATGGACGTGATCCTGGTGGGCTCTAGCGAGCTGTCCTCTAGCGTGTCT |
| | | CCAGGAACCGGAAGGGATCTGATCGCATACGAGGTGAAGGCCAATCAG |
| | | CGGAACATCGAGGACATCTGTATCTGCTGTGGCAGCCTGCAGGTGCACA |
| | | CACAGCACCCACTGTTCGAGGGAGGAATCTGCGCACCCTGTAAGGATAA |
| | | GTTCCTGGACGCCCTGTTTCTGTACGACGATGACGGCTACCAGTCCTATT |
| | | GCTCTATCTGCTGTTCCGGCGAGACCCTGCTGATCTGCGGCAATCCAGAT |
| | | TGTACAAGGTGCTATTGTTTTGAGTGCGTGGACTCTCTGGTGGGACCAGG |
| | | CACCAGCGGAAAGGTGCACGCCATGTCCAACTGGGTGTGCTACCTGTGC |
| | | CTGCCATCCTCTCGCAGCGGACTGCTGCAGCGGAGAAGGAAGTGGAGAT |
| | | CCCAGCTGAAGGCCTTCTATGATAGGGAGTCTGAGAACCCCCTGGAGAT |
| | | GTTTGAGACCGTGCCAGTGTGGCGCCGGCAGCCCGTGAGGGTGCTGAGC |
| | | CTGTTCGAGGATATCAAGAAGGAGCTGACATCCCTGGGCTTTCTGGAGTC |
| | | CGGCTCTGACCCCGGACAGCTGAAGCACGTGGTGGATGTGACCGACACA |
| | | GTGCGGAAGGATGTGGAGGAGTGGGGCCCTTTCGACCTGGTGTACGGA |
| | | GCAACCCCTCCACTGGGACACACATGCGACAGACCCCCTTCTTGGTACCT |
| | | GTTCCAGTTTCACCGCCTGCTGCAGTATGCAAGGCCAAAGCCAGGCAGCC |
| | | CTAGACCATTCTTTTGGATGTTCGTGGATAATCTGGTGCTGAACAAGGAG |
| | | GATCTGGACGTGGCCAGCAGGTTTCTGGAGATGGAGCCAGTGACCATCC |
| | | CAGACGTGCACGGCGGCTCCCTGCAGAATGCCGTGCGCGTGTGGTCTAA |
| | | CATCCCTGCCATCAGAAGCAGGCACTGGGCACTGGTGAGCGAGGAGGA |
| | | GCTGTCCCTGCTGGCCCAGAATAAGCAGAGCAGCAAGCTGGCCGCCAAG |
| | | TGGCCTACAAAGCTGGTGAAGAACTGCTTCCTGCCACTGCGGGAGTACTT |
| | | CAAGTATTTTTCCACCGAGCTGACATCTAGCCTGGGAGGACCCTCCTCTG |
| | | GCGCCCCACCACCTAGCGGCGGCTCCCCTGCCGGCTCTCCAACCAGCACA |
| | | GAGGAGGGCACCAGCGAGTCCGCCACACCAGAGTCTGGACCTGGCACCA |
| | | GCACAGAGCCATCCGAGGGCTCTGCCCCGGGCTCTCCTGCAGGCAGCCC |
| | | TACCTCCACCGAAGAGGGCACCAGCACAGAGCCTTCTGAGGGCAGCGCC |
| | | CCAGGCACCTCTACAGAGCCAAGCGAGCTCGAGGACAAGAAGTACAGCA |
| | | TCGGCCTGGCCATCGGCACCAACTCTGTGGGCTGGGCCGTGATCACCGA |
| | | CGAGTACAAGGTGCCCAGCAAGAAATTCAAGGTGCTGGGCAACACCGAC |
| | | CGGCACAGCATCAAGAAGAACCTGATCGGAGCCCTGCTGTTCGACAGCG |
| | | GCGAAACAGCCGAGGCCACCCGGCTGAAGAGAACCGCCAGAAGAAGAT |
| | | ACACCAGACGGAAGAACCGGATCTGCTATCTGCAAGAGATCTTCAGCAA |
| | | CGAGATGGCCAAGGTGGACGACAGCTTCTTCCACAGACTGGAAGAGTCC |
| | | TTCCTGGTGGAAGAGGATAAGAAGCACGAGCGGCACCCCATCTTCGGCA |
| | | ACATCGTGGACGAGGTGGCCTACCACGAGAAGTACCCCACCATCTACCAC |
| | | CTGAGAAAGAAACTGGTGGACAGCACCGACAAGGCCGACCTGCGGCTG |
| | | ATCTATCTGGCCCTGGCCCACATGATCAAGTTCCGGGGCCACTTCCTGAT |
| | | CGAGGGCGACCTGAACCCCGACAACAGCGACGTGGACAAGCTGTTCATC |
| | | CAGCTGGTGCAGACCTACAACCAGCTGTTCGAGGAAAACCCCATCAACG |
| | | CCAGCGGCGTGGACGCCAAGGCCATCCTGTCTGCCAGACTGAGCAAGAG |
| | | CAGACGGCTGGAAAATCTGATCGCCCAGCTGCCCGGCGAGAAGAAGAAT |
| | | GGCCTGTTCGGCAACCTGATTGCCCTGAGCCTGGGCCTGACCCCCAACTT |
| | | CAAGAGCAACTTCGACCTGGCCGAGGATGCCAAACTGCAGCTGAGCAAG |
| | | GACACCTACGACGACGACCTGGACAACCTGCTGGCCCAGATCGGCGACC |
| | | AGTACGCCGACCTGTTTCTGGCCGCCAAGAACCTGTCCGACGCCATCCTG |
| | | CTGAGCGACATCCTGAGAGTGAACACCGAGATCACCAAGGCCCCCCTGA |
| | | GCGCCTCTATGATCAAGAGATACGACGAGCACCACCAGGACCTGACCCT |
| | | GCTGAAAGCTCTCGTGCGGCAGCAGCTGCCTGAGAAGTACAAAGAGATT |
| | | TTCTTCGACCAGAGCAAGAACGGCTACGCCGGCTACATTGACGGCGGAG |
| | | CCAGCCAGGAAGAGTTCTACAAGTTCATCAAGCCCATCCTGGAAAAGAT |
| | | GGACGGCACCGAGGAACTGCTCGTGAAGCTGAACAGAGAGGACCTGCT |
| | | GCGGAAGCAGCGGACCTTCGACAACGGCAGCATCCCCCACCAGATCCAC |
| | | CTGGGAGAGCTGCACGCCATTCTGCGGCGGCAGGAAGATTTTTACCCATT |
| | | CCTGAAGGACAACCGGGAAAAGATCGAGAAGATCCTGACCTTCCGCATC |
| | | CCCTACTACGTGGGCCCTCTGGCCAGGGGAAACAGCAGATTCGCCTGGA |
| | | TGACCAGAAAGAGCGAGGAAACCATCACCCCCTGGAACTTCGAGGAAGT |
| | | GGTGGACAAGGGCGCTTCCGCCCAGAGCTTCATCGAGCGGATGACCAAC |
| | | TTCGATAAGAACCTGCCCAACGAGAAGGTGCTGCCCAAGCACAGCCTGC |
| | | TGTACGAGTACTTCACCGTGTATAACGAGCTGACCAAAGTGAAATACGTG |
| | | ACCGAGGGAATGAGAAAGCCCGCCTTCCTGAGCGGCGAGCAGAAAAAG |
| | | GCCATCGTGGACCTGCTGTTCAAGACCAACCGGAAAGTGACCGTGAAGC |
| | | AGCTGAAAGAGGACTACTTCAAGAAAATCGAGTGCTTCGACTCCGTGGA |
| | | AATCTCCGGCGTGGAAGATCGGTTCAACGCCTCCCTGGGCACATACCACG |
| | | ATCTGCTGAAAATTATCAAGGACAAGGACTTCCTGGACAATGAGGAAAA |
| | | CGAGGACATTCTGGAAGATATCGTGCTGACCCTGACACTGTTTGAGGAC |
| | | AGAGAGATGATCGAGGAACGGCTGAAAACCTATGCCCACCTGTTCGACG |
| | | ACAAAGTGATGAAGCAGCTGAAGCGGCGGAGATACACCGGCTGGGGCA |
| | | GGCTGAGCCGGAAGCTGATCAACGGCATCCGGGACAAGCAGTCCGGCA |
| | | AGACAATCCTGGATTTCCTGAAGTCCGACGGCTTCGCCAACAGAAACTTC |
| | | ATGCAGCTGATCCACGACGACAGCCTGACCTTTAAAGAGGACATCCAGA |
| | | AAGCCCAGGTGTCCGGCCAGGGCGATAGCCTGCACGAGCACATTGCCAA |
| | | TCTGGCCGGCAGCCCCGCCATTAAGAAGGGCATCCTGCAGACAGTGAAG |
| | | GTGGTGGACGAGCTCGTGAAAGTGATGGGCCGGCACAAGCCCGAGAAC |
| | | ATCGTGATCGAAATGGCCAGAGAGAACCAGACCACCCAGAAGGGACAG |
| | | AAGAACAGCCGCGAGAGAATGAAGCGGATCGAAGAGGGCATCAAAGAG |
| | | CTGGGCAGCCAGATCCTGAAAGAACACCCCGTGGAAAACACCCAGCTGC |
| | | AGAACGAGAAGCTGTACCTGTACTACCTGCAGAATGGGGGGATATGTA |
| | | CGTGGACCAGGAACTGGACATCAACCGGCTGTCCGACTACGATGTGGAC |
| | | GCCATCGTGCCTCAGAGCTTTCTGAAGGACGACTCCATCGACAACAAGGT |
| | | GCTGACCAGAAGCGACAAGAACCGGGGCAAGAGCGACAACGTGCCCTC |
| | | CGAAGAGGTCGTGAAGAAGATGAAGAACTACTGGCGGCAGCTGCTGAA |
| | | CGCCAAGCTGATTACCCAGAGAAAGTTCGACAATCTGACCAAGGCCGAG |
| | | AGAGGCGGCCTGAGCGAACTGGATAAGGCCGGCTTCATCAAGAGACAG |
| | | CTGGTGGAAACCCGGCAGATCACAAAGCACGTGGCACAGATCCTGGACT |
| | | CCCGGATGAACACTAAGTACGACGAGAATGACAAGCTGATCCGGGAAGT |
| | | GAAAGTGATCACCCTGAAGTCCAAGCTGGTGTCCGATTTCCGGAAGGAT |
| | | TTCCAGTTTTACAAAGTGCGCGAGATCAACAACTACCACCACGCCCACGA |
| | | CGCCTACCTGAACGCCGTCGTGGGAACCGCCCTGATCAAAAAGTACCCTA |
| | | AGCTGGAAAGCGAGTTCGTGTACGGCGACTACAAGGTGTACGACGTGCG |
| | | GAAGATGATCGCCAAGAGCGAGCAGGAAATCGGCAAGGCTACCGCCAA |
| | | GTACTTCTTCTACAGCAACATCATGAACTTTTTCAAGACCGAGATTACCCT |
| | | GGCCAACGGCGAGATCCGGAAGCGGCCTCTGATCGAGACAAACGGCGA |
| | | AACCGGGGAGATCGTGTGGGATAAGGGCCGGGATTTTGCCACCGTGCG |
| | | GAAAGTGCTGAGCATGCCCCAAGTGAATATCGTGAAAAAGACCGAGGTG |
| | | CAGACAGGCGGCTTCAGCAAAGAGTCTATCCTGCCCAAGAGGAACAGCG |
| | | ATAAGCTGATCGCCAGAAAGAAGGACTGGGACCCTAAGAAGTACGGCG |
| | | GCTTCGACAGCCCCACCGTGGCCTATTCTGTGCTGGTGGTGGCCAAAGTG |
| | | GAAAAGGGCAAGTCCAAGAAACTGAAGAGTGTGAAAGAGCTGCTGGGG |
| | | ATCACCATCATGGAAAGAAGCAGCTTCGAGAAGAATCCCATCGACTTTCT |
| | | GGAAGCCAAGGGCTACAAAGAAGTGAAAAAGGACCTGATCATCAAGCT |
| | | GCCTAAGTACTCCCTGTTCGAGCTGGAAAACGGCCGGAAGAGAATGCTG |
| | | GCCTCTGCCGGCGAACTGCAGAAGGGAAACGAACTGGCCCTGCCCTCCA |
| | | AATATGTGAACTTCCTGTACCTGGCCAGCCACTATGAGAAGCTGAAGGGC |
| | | TCCCCCGAGGATAATGAGCAGAAACAGCTGTTTGTGGAACAGCACAAGC |
| | | ACTACCTGGACGAGATCATCGAGCAGATCAGCGAGTTCTCCAAGAGAGT |
| | | GATCCTGGCCGACGCTAATCTGGACAAAGTGCTGTCCGCCTACAACAAGC |
| | | ACCGGGATAAGCCCATCAGAGAGCAGGCCGAGAATATCATCCACCTGTT |
| | | TACCCTGACCAATCTGGGAGCCCCTGCCGCCTTCAAGTACTTTGACACCA |
| | | CCATCGACCGGAAGAGGTACACCAGCACCAAAGAGGTGCTGGACGCCAC |
| | | CCTGATCCACCAGAGCATCACCGGCCTGTACGAGACACGGATCGACCTGT |
| | | CTCAGCTGGGAGGCGACAGCCCCAAGAAGAAGAGAAAGGTGGGAGTCG |
| | | ACGGATCCAGCGGCTCCGAGACCCCAGGCACATCTGAGAGCGCCACCCC |
| | | TGAGTCCACCGGTAACAAAAAGCTTGAGGCCGTCGGAACCGGAATCGAA |
| | | CCAAAAGCAATGTCCCAGGGTTTGGTGACATTTGGCGACGTGGCTGTCG |
| | | ATTTTTCCCAGGAAGAGTGGGAGTGGCTCAATCCTATCCAGAGGAACTTG |
| | | TACCGGAAGGTGATGCTGGAGAATTATAGAAATTTGGCATCACTGGGGT |
| | | TGTGCGTTAGCAAACCAGATGTTATATCTTCCCTGGAACAGGGAAAGGA |
| | | GCCCTGGAGCGCTGATTACAAAGATGATGACGATAAAGCCCCCAAGAAG |
| | | AAAAGGAAGGTCCCAAAGAAAAAAAGAAAGGTGTGA |
| 1758 | Fusion Protein | MGTMPKKKRKVPKKKRKVYNHDQEFDPPKVYPPVPAEKRKPIRVLSLFDGIA |
| | 11 Amino Acid | TGLLVLKDLGIQVDRYIASEVCEDSITVGMVRHQGKIMYVGDVRSVTQKHIQ |
| | Sequence | EWGPFDLVIGGSPCNDLSIVNPARKGLYEGTGRLFFEFYRLLHDARPKEGDD |
| | NLS-NLS-3A-ADD- | RPFFWLFENVVAMGVSDKRDISRFLESNPVMIDAKEVSAAHRARYFWGNLP |
| | h3L-dCas9-ZIM3- | GMNRPLASTVNDKLELQECLEHGRIAKFSKVRTITTRSNSIKQGKDQHFPVF |
| | NLS-NLS | MNEKEDILWCTEMERVFGFPVHYTDVSNMSRLARQRLLGRSWSVPVIRHLF |
| | | APLKEYFACVSSGNSNANSRGPSFSSGLVPLSLRGSHMAAIPALDPEAEPSM |
| | | DVILVGSSELSSSVSPGTGRDLIAYEVKANQRNIEDICICCGSLQVHTQHPLFE |
| | | GGICAPCKDKFLDALFLYDDDGYQSYCSICCSGETLLICGNPDCTRCYCFECVD |
| | | SLVGPGTSGKVHAMSNWVCYLCLPSSRSGLLQRRRKWRSQLKAFYDRESEN |
| | | PLEMFETVPVWRRQPVRVLSLFEDIKKELTSLGFLESGSDPGQLKHVVDVTD |
| | | TVRKDVEEWGPFDLVYGATPPLGHTCDRPPSWYLFQFHRLLQYARPKPGSP |
| | | RPFFWMFVDNLVLNKEDLDVASRFLEMEPVTIPDVHGGSLQNAVRVWSNI |
| | | PAIRSRHWALVSEEELSLLAQNKQSSKLAAKWPTKLVKNCFLPLREYFKYFSTE |
| | | LTSSLGGPSSGAPPPSGGSPAGSPTSTEEGTSESATPESGPGTSTEPSEGSAPG |
| | | SPAGSPTSTEEGTSTEPSEGSAPGTSTEPSELEDKKYSIGLAIGTNSVGWAVIT |
| | | DEYKVPSKKFKVLGNTDRHSIKKNLIGALLFDSGETAEATRLKRTARRRYTRRK |
| | | NRICYLQEIFSNEMAKVDDSFFHRLEESFLVEEDKKHERHPIFGNIVDEVAYHE |
| | | KYPTIYHLRKKLVDSTDKADLRLIYLALAHMIKFRGHFLIEGDLNPDNSDVDKL |
| | | FIQLVQTYNQLFEENPINASGVDAKAILSARLSKSRRLENLIAQLPGEKKNGLF |
| | | GNLIALSLGLTPNFKSNFDLAEDAKLQLSKDTYDDDLDNLLAQIGDQYADLFL |
| | | AAKNLSDAILLSDILRVNTEITKAPLSASMIKRYDEHHQDLTLLKALVRQQLPE |
| | | KYKEIFFDQSKNGYAGYIDGGASQEEFYKFIKPILEKMDGTEELLVKLNREDLL |
| | | RKQRTFDNGSIPHQIHLGELHAILRRQEDFYPFLKDNREKIEKILTFRIPYYVGP |
| | | LARGNSRFAWMTRKSEETITPWNFEEVVDKGASAQSFIERMTNFDKNLPNE |
| | | KVLPKHSLLYEYFTVYNELTKVKYVTEGMRKPAFLSGEQKKAIVDLLFKTNRKV |
| | | TVKQLKEDYFKKIECFDSVEISGVEDRFNASLGTYHDLLKIIKDKDFLDNEENE |
| | | DILEDIVLTLTLFEDREMIEERLKTYAHLFDDKVMKQLKRRRYTGWGRLSRKLI |
| | | NGIRDKQSGKTILDFLKSDGFANRNFMQLIHDDSLTFKEDIQKAQVSGQGDS |
| | | LHEHIANLAGSPAIKKGILQTVKVVDELVKVMGRHKPENIVIEMARENQTTQ |
| | | KGQKNSRERMKRIEEGIKELGSQILKEHPVENTQLQNEKLYLYYLQNGRDMY |
| | | VDQELDINRLSDYDVDAIVPQSFLKDDSIDNKVLTRSDKNRGKSDNVPSEEV |
| | | VKKMKNYWRQLLNAKLITQRKFDNLTKAERGGLSELDKAGFIKRQLVETRQI |
| | | TKHVAQILDSRMNTKYDENDKLIREVKVITLKSKLVSDFRKDFQFYKVREINNY |
| | | HHAHDAYLNAVVGTALIKKYPKLESEFVYGDYKVYDVRKMIAKSEQEIGKAT |
| | | AKYFFYSNIMNFFKTEITLANGEIRKRPLIETNGETGEIVWDKGRDFATVRKVL |
| | | SMPQVNIVKKTEVQTGGFSKESILPKRNSDKLIARKKDWDPKKYGGFDSPTV |
| | | AYSVLVVAKVEKGKSKKLKSVKELLGITIMERSSFEKNPIDFLEAKGYKEVKKDL |
| | | IIKLPKYSLFELENGRKRMLASAGELQKGNELALPSKYVNFLYLASHYEKLKGS |
| | | PEDNEQKQLFVEQHKHYLDEIIEQISEFSKRVILADANLDKVLSAYNKHRDKPI |
| | | REQAENIIHLFTLTNLGAPAAFKYFDTTIDRKRYTSTKEVLDATLIHQSITGLYE |
| | | TRIDLSQLGGDSPKKKRKVGVDGSSGSETPGTSESATPESTGMNNSQGRVTFE |
| | | DVTVNFTQGEWQRLNPEQRNLYRDVMLENYSNLVSVGQGETTKPDVILRLE |
| | | QGKEPWLEEEEVLGSGRAEKNGDIGGQIWKPKDVKESLSADYKDDDDKAPK |
| | | KKRKVPKKKRKV |
| 1759 | Fusion Protein | ATGGGTACCATGCCAAAAAAGAAGAGAAAGGTACCGAAGAAAAAAAGA |
| | 11 DNA Sequence | AAGGTATACAATCACGATCAGGAGTTCGACCCCCCTAAGGTGTACCCACC |
| | | AGTGCCTGCAGAGAAGAGGAAGCCAATCCGGGTGCTGAGCCTGTTTGAT |
| | | GGCATCGCCACCGGCCTGCTGGTGCTGAAGGATCTGGGCATCCAGGTGG |
| | | ACCGGTACATCGCCTCCGAGGTGTGCGAGGATTCTATCACCGTGGGCAT |
| | | GGTGCGCCACCAGGGCAAGATCATGTATGTGGGCGACGTGCGGTCCGTG |
| | | ACACAGAAGCACATCCAGGAGTGGGGCCCATTCGATCTGGTGATCGGCG |
| | | GCAGCCCCTGTAATGACCTGTCCATCGTGAACCCTGCAAGGAAGGGACT |
| | | GTACGAGGGAACCGGCCGGCTGTTCTTTGAGTTTTATAGACTGCTGCACG |
| | | ACGCCAGGCCTAAGGAGGGCGACGATAGACCATTCTTTTGGCTGTTCGA |
| | | GAATGTGGTGGCTATGGGCGTGAGCGATAAGAGGGACATCTCCAGGTTT |
| | | CTGGAGTCTAACCCCGTGATGATCGATGCAAAGGAGGTGTCCGCCGCAC |
| | | ACAGAGCCAGGTATTTCTGGGGCAATCTGCCAGGAATGAACAGGCCACT |
| | | GGCAAGCACCGTGAATGACAAGCTGGAGCTGCAGGAGTGCCTGGAGCA |
| | | CGGAAGGATCGCCAAGTTTTCCAAGGTGCGCACAATCACCACACGGAGC |
| | | AATTCCATCAAGCAGGGCAAGGATCAGCACTTCCCCGTGTTCATGAACGA |
| | | GAAGGAGGACATCCTGTGGTGTACCGAGATGGAGAGAGTGTTCGGCTTT |
| | | CCAGTGCACTACACAGACGTGTCTAACATGAGCAGGCTGGCAAGGCAGC |
| | | GGCTGCTGGGCAGATCTTGGAGCGTGCCCGTGATCAGGCACCTGTTCGC |
| | | CCCTCTGAAGGAGTATTTTGCCTGCGTGAGCAGCGGCAACTCCAATGCCA |
| | | ACAGCCGGGGCCCCTCTTTCAGCTCCGGATTGGTGCCTCTGAGCCTGAGG |
| | | GGCTCCCACATGGCAGCAATCCCCGCCCTGGACCCCGAGGCCGAGCCTA |
| | | GCATGGACGTGATCCTGGTGGGCTCTAGCGAGCTGTCCTCTAGCGTGTCT |
| | | CCAGGAACCGGAAGGGATCTGATCGCATACGAGGTGAAGGCCAATCAG |
| | | CGGAACATCGAGGACATCTGTATCTGCTGTGGCAGCCTGCAGGTGCACA |
| | | CACAGCACCCACTGTTCGAGGGAGGAATCTGCGCACCCTGTAAGGATAA |
| | | GTTCCTGGACGCCCTGTTTCTGTACGACGATGACGGCTACCAGTCCTATT |
| | | GCTCTATCTGCTGTTCCGGCGAGACCCTGCTGATCTGCGGCAATCCAGAT |
| | | TGTACAAGGTGCTATTGTTTTGAGTGCGTGGACTCTCTGGTGGGACCAGG |
| | | CACCAGCGGAAAGGTGCACGCCATGTCCAACTGGGTGTGCTACCTGTGC |
| | | CTGCCATCCTCTCGCAGCGGACTGCTGCAGCGGAGAAGGAAGTGGAGAT |
| | | CCCAGCTGAAGGCCTTCTATGATAGGGAGTCTGAGAACCCCCTGGAGAT |
| | | GTTTGAGACCGTGCCAGTGTGGCGCCGGCAGCCCGTGAGGGTGCTGAGC |
| | | CTGTTCGAGGATATCAAGAAGGAGCTGACATCCCTGGGCTTTCTGGAGTC |
| | | CGGCTCTGACCCCGGACAGCTGAAGCACGTGGTGGATGTGACCGACACA |
| | | GTGCGGAAGGATGTGGAGGAGTGGGGCCCTTTCGACCTGGTGTACGGA |
| | | GCAACCCCTCCACTGGGACACACATGCGACAGACCCCCTTCTTGGTACCT |
| | | GTTCCAGTTTCACCGCCTGCTGCAGTATGCAAGGCCAAAGCCAGGCAGCC |
| | | CTAGACCATTCTTTTGGATGTTCGTGGATAATCTGGTGCTGAACAAGGAG |
| | | GATCTGGACGTGGCCAGCAGGTTTCTGGAGATGGAGCCAGTGACCATCC |
| | | CAGACGTGCACGGCGGCTCCCTGCAGAATGCCGTGCGCGTGTGGTCTAA |
| | | CATCCCTGCCATCAGAAGCAGGCACTGGGCACTGGTGAGCGAGGAGGA |
| | | GCTGTCCCTGCTGGCCCAGAATAAGCAGAGCAGCAAGCTGGCCGCCAAG |
| | | TGGCCTACAAAGCTGGTGAAGAACTGCTTCCTGCCACTGCGGGAGTACTT |
| | | CAAGTATTTTTCCACCGAGCTGACATCTAGCCTGGGAGGACCCTCCTCTG |
| | | GCGCCCCACCACCTAGCGGCGGCTCCCCTGCCGGCTCTCCAACCAGCACA |
| | | GAGGAGGGCACCAGCGAGTCCGCCACACCAGAGTCTGGACCTGGCACCA |
| | | GCACAGAGCCATCCGAGGGCTCTGCCCCAGGCTCTCCTGCAGGCAGCCC |
| | | TACCTCCACCGAAGAGGGCACCAGCACAGAGCCTTCTGAGGGCAGCGCC |
| | | CCAGGCACCTCTACAGAGCCAAGCGAGCTCGAGGACAAGAAGTACAGCA |
| | | TCGGCCTGGCCATCGGCACCAACTCTGTGGGCTGGGCCGTGATCACCGA |
| | | CGAGTACAAGGTGCCCAGCAAGAAATTCAAGGTGCTGGGCAACACCGAC |
| | | CGGCACAGCATCAAGAAGAACCTGATCGGAGCCCTGCTGTTCGACAGCG |
| | | GCGAAACAGCCGAGGCCACCCGGCTGAAGAGAACCGCCAGAAGAAGAT |
| | | ACACCAGACGGAAGAACCGGATCTGCTATCTGCAAGAGATCTTCAGCAA |
| | | CGAGATGGCCAAGGTGGACGACAGCTTCTTCCACAGACTGGAAGAGTCC |
| | | TTCCTGGTGGAAGAGGATAAGAAGCACGAGCGGCACCCCATCTTCGGCA |
| | | ACATCGTGGACGAGGTGGCCTACCACGAGAAGTACCCCACCATCTACCAC |
| | | CTGAGAAAGAAACTGGTGGACAGCACCGACAAGGCCGACCTGCGGCTG |
| | | ATCTATCTGGCCCTGGCCCACATGATCAAGTTCCGGGGCCACTTCCTGAT |
| | | CGAGGGCGACCTGAACCCCGACAACAGCGACGTGGACAAGCTGTTCATC |
| | | CAGCTGGTGCAGACCTACAACCAGCTGTTCGAGGAAAACCCCATCAACG |
| | | CCAGCGGCGTGGACGCCAAGGCCATCCTGTCTGCCAGACTGAGCAAGAG |
| | | CAGACGGCTGGAAAATCTGATCGCCCAGCTGCCCGGCGAGAAGAAGAAT |
| | | GGCCTGTTCGGCAACCTGATTGCCCTGAGCCTGGGCCTGACCCCCAACTT |
| | | CAAGAGCAACTTCGACCTGGCCGAGGATGCCAAACTGCAGCTGAGCAAG |
| | | GACACCTACGACGACGACCTGGACAACCTGCTGGCCCAGATCGGCGACC |
| | | AGTACGCCGACCTGTTTCTGGCCGCCAAGAACCTGTCCGACGCCATCCTG |
| | | CTGAGCGACATCCTGAGAGTGAACACCGAGATCACCAAGGCCCCCCTGA |
| | | GCGCCTCTATGATCAAGAGATACGACGAGCACCACCAGGACCTGACCCT |
| | | GCTGAAAGCTCTCGTGCGGCAGCAGCTGCCTGAGAAGTACAAAGAGATT |
| | | TTCTTCGACCAGAGCAAGAACGGCTACGCCGGCTACATTGACGGCGGAG |
| | | CCAGCCAGGAAGAGTTCTACAAGTTCATCAAGCCCATCCTGGAAAAGAT |
| | | GGACGGCACCGAGGAACTGCTCGTGAAGCTGAACAGAGAGGACCTGCT |
| | | GCGGAAGCAGCGGACCTTCGACAACGGCAGCATCCCCCACCAGATCCAC |
| | | CTGGGAGAGCTGCACGCCATTCTGCGGCGGCAGGAAGATTTTTACCCATT |
| | | CCTGAAGGACAACCGGGAAAAGATCGAGAAGATCCTGACCTTCCGCATC |
| | | CCCTACTACGTGGGCCCTCTGGCCAGGGGAAACAGCAGATTCGCCTGGA |
| | | TGACCAGAAAGAGCGAGGAAACCATCACCCCCTGGAACTTCGAGGAAGT |
| | | GGTGGACAAGGGCGCTTCCGCCCAGAGCTTCATCGAGCGGATGACCAAC |
| | | TTCGATAAGAACCTGCCCAACGAGAAGGTGCTGCCCAAGCACAGCCTGC |
| | | TGTACGAGTACTTCACCGTGTATAACGAGCTGACCAAAGTGAAATACGTG |
| | | ACCGAGGGAATGAGAAAGCCCGCCTTCCTGAGCGGCGAGCAGAAAAAG |
| | | GCCATCGTGGACCTGCTGTTCAAGACCAACCGGAAAGTGACCGTGAAGC |
| | | AGCTGAAAGAGGACTACTTCAAGAAAATCGAGTGCTTCGACTCCGTGGA |
| | | AATCTCCGGCGTGGAAGATCGGTTCAACGCCTCCCTGGGCACATACCACG |
| | | ATCTGCTGAAAATTATCAAGGACAAGGACTTCCTGGACAATGAGGAAAA |
| | | CGAGGACATTCTGGAAGATATCGTGCTGACCCTGACACTGTTTGAGGAC |
| | | AGAGAGATGATCGAGGAACGGCTGAAAACCTATGCCCACCTGTTCGACG |
| | | ACAAAGTGATGAAGCAGCTGAAGCGGCGGAGATACACCGGCTGGGGCA |
| | | GGCTGAGCCGGAAGCTGATCAACGGCATCCGGGACAAGCAGTCCGGCA |
| | | AGACAATCCTGGATTTCCTGAAGTCCGACGGCTTCGCCAACAGAAACTTC |
| | | ATGCAGCTGATCCACGACGACAGCCTGACCTTTAAAGAGGACATCCAGA |
| | | AAGCCCAGGTGTCCGGCCAGGGCGATAGCCTGCACGAGCACATTGCCAA |
| | | TCTGGCCGGCAGCCCCGCCATTAAGAAGGGCATCCTGCAGACAGTGAAG |
| | | GTGGTGGACGAGCTCGTGAAAGTGATGGGCCGGCACAAGCCCGAGAAC |
| | | ATCGTGATCGAAATGGCCAGAGAGAACCAGACCACCCAGAAGGGACAG |
| | | AAGAACAGCCGCGAGAGAATGAAGCGGATCGAAGAGGGCATCAAAGAG |
| | | CTGGGCAGCCAGATCCTGAAAGAACACCCCGTGGAAAACACCCAGCTGC |
| | | AGAACGAGAAGCTGTACCTGTACTACCTGCAGAATGGGGGGATATGTA |
| | | CGTGGACCAGGAACTGGACATCAACCGGCTGTCCGACTACGATGTGGAC |
| | | GCCATCGTGCCTCAGAGCTTTCTGAAGGACGACTCCATCGACAACAAGGT |
| | | GCTGACCAGAAGCGACAAGAACCGGGGCAAGAGCGACAACGTGCCCTC |
| | | CGAAGAGGTCGTGAAGAAGATGAAGAACTACTGGCGGCAGCTGCTGAA |
| | | CGCCAAGCTGATTACCCAGAGAAAGTTCGACAATCTGACCAAGGCCGAG |
| | | AGAGGCGGCCTGAGCGAACTGGATAAGGCCGGCTTCATCAAGAGACAG |
| | | CTGGTGGAAACCCGGCAGATCACAAAGCACGTGGCACAGATCCTGGACT |
| | | CCCGGATGAACACTAAGTACGACGAGAATGACAAGCTGATCCGGGAAGT |
| | | GAAAGTGATCACCCTGAAGTCCAAGCTGGTGTCCGATTTCCGGAAGGAT |
| | | TTCCAGTTTTACAAAGTGCGCGAGATCAACAACTACCACCACGCCCACGA |
| | | CGCCTACCTGAACGCCGTCGTGGGAACCGCCCTGATCAAAAAGTACCCTA |
| | | AGCTGGAAAGCGAGTTCGTGTACGGCGACTACAAGGTGTACGACGTGCG |
| | | GAAGATGATCGCCAAGAGCGAGCAGGAAATCGGCAAGGCTACCGCCAA |
| | | GTACTTCTTCTACAGCAACATCATGAACTTTTTCAAGACCGAGATTACCCT |
| | | GGCCAACGGCGAGATCCGGAAGCGGCCTCTGATCGAGACAAACGGCGA |
| | | AACCGGGGAGATCGTGTGGGATAAGGGCCGGGATTTTGCCACCGTGCG |
| | | GAAAGTGCTGAGCATGCCCCAAGTGAATATCGTGAAAAAGACCGAGGTG |
| | | CAGACAGGCGGCTTCAGCAAAGAGTCTATCCTGCCCAAGAGGAACAGCG |
| | | ATAAGCTGATCGCCAGAAAGAAGGACTGGGACCCTAAGAAGTACGGCG |
| | | GCTTCGACAGCCCCACCGTGGCCTATTCTGTGCTGGTGGTGGCCAAAGTG |
| | | GAAAAGGGCAAGTCCAAGAAACTGAAGAGTGTGAAAGAGCTGCTGGGG |
| | | ATCACCATCATGGAAAGAAGCAGCTTCGAGAAGAATCCCATCGACTTTCT |
| | | GGAAGCCAAGGGCTACAAAGAAGTGAAAAAGGACCTGATCATCAAGCT |
| | | GCCTAAGTACTCCCTGTTCGAGCTGGAAAACGGCCGGAAGAGAATGCTG |
| | | GCCTCTGCCGGCGAACTGCAGAAGGGAAACGAACTGGCCCTGCCCTCCA |
| | | AATATGTGAACTTCCTGTACCTGGCCAGCCACTATGAGAAGCTGAAGGGC |
| | | TCCCCCGAGGATAATGAGCAGAAACAGCTGTTTGTGGAACAGCACAAGC |
| | | ACTACCTGGACGAGATCATCGAGCAGATCAGCGAGTTCTCCAAGAGAGT |
| | | GATCCTGGCCGACGCTAATCTGGACAAAGTGCTGTCCGCCTACAACAAGC |
| | | ACCGGGATAAGCCCATCAGAGAGCAGGCCGAGAATATCATCCACCTGTT |
| | | TACCCTGACCAATCTGGGAGCCCCTGCCGCCTTCAAGTACTTTGACACCA |
| | | CCATCGACCGGAAGAGGTACACCAGCACCAAAGAGGTGCTGGACGCCAC |
| | | CCTGATCCACCAGAGCATCACCGGCCTGTACGAGACACGGATCGACCTGT |
| | | CTCAGCTGGGAGGCGACAGCCCCAAGAAGAAGAGAAAGGTGGGAGTCG |
| | | ACGGATCCAGCGGCTCCGAGACCCCAGGCACATCTGAGAGCGCCACCCC |
| | | TGAGTCCACCGGTATGAACAATTCACAGGGGAGAGTGACATTCGAAGAC |
| | | GTGACCGTGAACTTCACCCAGGGAGAATGGCAGCGCTTGAACCCAGAAC |
| | | AAAGGAACCTCTATCGGGACGTGATGCTGGAAAACTACTCAAATTTGGT |
| | | GAGCGTTGGGCAGGGTGAGACCACTAAGCCTGACGTGATCCTGAGATTG |
| | | GAACAGGGCAAGGAGCCTTGGCTCGAGGAAGAGGAAGTCCTGGGCTCA |
| | | GGGAGGGCCGAGAAAAACGGTGATATAGGAGGCCAGATATGGAAGCCT |
| | | AAGGACGTCAAGGAGAGCCTGAGCGCTGATTACAAAGATGATGACGATA |
| | | AAGCCCCCAAGAAGAAAAGGAAGGTCCCAAAGAAAAAAAGAAAGGTGT |
| | | GA |
| 1760 | Fusion Protein | MGTMPKKKRKVPKKKRKVYNHDQEFDPPKVYPPVPAEKRKPIRVLSLFDGIA |
| | 12 Amino Acid | TGLLVLKDLGIQVDRYIASEVCEDSITVGMVRHQGKIMYVGDVRSVTQKHIQ |
| | Sequence | EWGPFDLVIGGSPCNDLSIVNPARKGLYEGTGRLFFEFYRLLHDARPKEGDD |
| | NLS-NLS-3A-ADD- | RPFFWLFENVVAMGVSDKRDISRFLESNPVMIDAKEVSAAHRARYFWGNLP |
| | h3L-dCas9-ZN627- | GMNRPLASTVNDKLELQECLEHGRIAKFSKVRTITTRSNSIKQGKDQHFPVF |
| | NLS-NLS | MNEKEDILWCTEMERVFGFPVHYTDVSNMSRLARQRLLGRSWSVPVIRHLF |
| | | APLKEYFACVSSGNSNANSRGPSFSSGLVPLSLRGSHMAAIPALDPEAEPSM |
| | | DVILVGSSELSSSVSPGTGRDLIAYEVKANQRNIEDICICCGSLQVHTQHPLFE |
| | | GGICAPCKDKFLDALFLYDDDGYQSYCSICCSGETLLICGNPDCTRCYCFECVD |
| | | SLVGPGTSGKVHAMSNWVCYLCLPSSRSGLLQRRRKWRSQLKAFYDRESEN |
| | | PLEMFETVPVWRRQPVRVLSLFEDIKKELTSLGFLESGSDPGQLKHVVDVTD |
| | | TVRKDVEEWGPFDLVYGATPPLGHTCDRPPSWYLFQFHRLLQYARPKPGSP |
| | | RPFFWMFVDNLVLNKEDLDVASRFLEMEPVTIPDVHGGSLQNAVRVWSNI |
| | | PAIRSRHWALVSEEELSLLAQNKQSSKLAAKWPTKLVKNCFLPLREYFKYFSTE |
| | | LTSSLGGPSSGAPPPSGGSPAGSPTSTEEGTSESATPESGPGTSTEPSEGSAPG |
| | | SPAGSPTSTEEGTSTEPSEGSAPGTSTEPSELEDKKYSIGLAIGTNSVGWAVIT |
| | | DEYKVPSKKFKVLGNTDRHSIKKNLIGALLFDSGETAEATRLKRTARRRYTRRK |
| | | NRICYLQEIFSNEMAKVDDSFFHRLEESFLVEEDKKHERHPIFGNIVDEVAYHE |
| | | KYPTIYHLRKKLVDSTDKADLRLIYLALAHMIKFRGHFLIEGDLNPDNSDVDKL |
| | | FIQLVQTYNQLFEENPINASGVDAKAILSARLSKSRRLENLIAQLPGEKKNGLF |
| | | GNLIALSLGLTPNFKSNFDLAEDAKLQLSKDTYDDDLDNLLAQIGDQYADLFL |
| | | AAKNLSDAILLSDILRVNTEITKAPLSASMIKRYDEHHQDLTLLKALVRQQLPE |
| | | KYKEIFFDQSKNGYAGYIDGGASQEEFYKFIKPILEKMDGTEELLVKLNREDLL |
| | | RKQRTFDNGSIPHQIHLGELHAILRRQEDFYPFLKDNREKIEKILTFRIPYYVGP |
| | | LARGNSRFAWMTRKSEETITPWNFEEVVDKGASAQSFIERMTNFDKNLPNE |
| | | KVLPKHSLLYEYFTVYNELTKVKYVTEGMRKPAFLSGEQKKAIVDLLFKTNRKV |
| | | TVKQLKEDYFKKIECFDSVEISGVEDRFNASLGTYHDLLKIIKDKDFLDNEENE |
| | | DILEDIVLTLTLFEDREMIEERLKTYAHLFDDKVMKQLKRRRYTGWGRLSRKLI |
| | | NGIRDKQSGKTILDFLKSDGFANRNFMQLIHDDSLTFKEDIQKAQVSGQGDS |
| | | LHEHIANLAGSPAIKKGILQTVKVVDELVKVMGRHKPENIVIEMARENQTTQ |
| | | KGQKNSRERMKRIEEGIKELGSQILKEHPVENTQLQNEKLYLYYLQNGRDMY |
| | | VDQELDINRLSDYDVDAIVPQSFLKDDSIDNKVLTRSDKNRGKSDNVPSEEV |
| | | VKKMKNYWRQLLNAKLITQRKFDNLTKAERGGLSELDKAGFIKRQLVETRQI |
| | | TKHVAQILDSRMNTKYDENDKLIREVKVITLKSKLVSDFRKDFQFYKVREINNY |
| | | HHAHDAYLNAVVGTALIKKYPKLESEFVYGDYKVYDVRKMIAKSEQEIGKAT |
| | | AKYFFYSNIMNFFKTEITLANGEIRKRPLIETNGETGEIVWDKGRDFATVRKVL |
| | | SMPQVNIVKKTEVQTGGFSKESILPKRNSDKLIARKKDWDPKKYGGFDSPTV |
| | | AYSVLVVAKVEKGKSKKLKSVKELLGITIMERSSFEKNPIDFLEAKGYKEVKKDL |
| | | IIKLPKYSLFELENGRKRMLASAGELQKGNELALPSKYVNFLYLASHYEKLKGS |
| | | PEDNEQKQLFVEQHKHYLDEIIEQISEFSKRVILADANLDKVLSAYNKHRDKPI |
| | | REQAENIIHLFTLTNLGAPAAFKYFDTTIDRKRYTSTKEVLDATLIHQSITGLYE |
| | | TRIDLSQLGGDSPKKKRKVGVDGSSGSETPGTSESATPESTGDSVAFEDVAVN |
| | | FTLEEWALLDPSQKNLYRDVMRETFRNLASVGKQWEDQNIEDPFKIPRRNIS |
| | | HIPERLCESKEGGQGEESADYKDDDDKAPKKKRKVPKKKRKV |
| 1761 | Fusion Protein | ATGGGTACCATGCCAAAAAAGAAGAGAAAGGTACCGAAGAAAAAAAGA |
| | 12 DNA Sequence | AAGGTATACAATCACGATCAGGAGTTCGACCCCCCTAAGGTGTACCCACC |
| | | AGTGCCTGCAGAGAAGAGGAAGCCAATCCGGGTGCTGAGCCTGTTTGAT |
| | | GGCATCGCCACCGGCCTGCTGGTGCTGAAGGATCTGGGCATCCAGGTGG |
| | | ACCGGTACATCGCCTCCGAGGTGTGCGAGGATTCTATCACCGTGGGCAT |
| | | GGTGCGCCACCAGGGCAAGATCATGTATGTGGGCGACGTGCGGTCCGTG |
| | | ACACAGAAGCACATCCAGGAGTGGGGCCCATTCGATCTGGTGATCGGCG |
| | | GCAGCCCCTGTAATGACCTGTCCATCGTGAACCCTGCAAGGAAGGGACT |
| | | GTACGAGGGAACCGGCCGGCTGTTCTTTGAGTTTTATAGACTGCTGCACG |
| | | ACGCCAGGCCTAAGGAGGGCGACGATAGACCATTCTTTTGGCTGTTCGA |
| | | GAATGTGGTGGCTATGGGCGTGAGCGATAAGAGGGACATCTCCAGGTTT |
| | | CTGGAGTCTAACCCCGTGATGATCGATGCAAAGGAGGTGTCCGCCGCAC |
| | | ACAGAGCCAGGTATTTCTGGGGCAATCTGCCAGGAATGAACAGGCCACT |
| | | GGCAAGCACCGTGAATGACAAGCTGGAGCTGCAGGAGTGCCTGGAGCA |
| | | CGGAAGGATCGCCAAGTTTTCCAAGGTGCGCACAATCACCACACGGAGC |
| | | AATTCCATCAAGCAGGGCAAGGATCAGCACTTCCCCGTGTTCATGAACGA |
| | | GAAGGAGGACATCCTGTGGTGTACCGAGATGGAGAGAGTGTTCGGCTTT |
| | | CCAGTGCACTACACAGACGTGTCTAACATGAGCAGGCTGGCAAGGCAGC |
| | | GGCTGCTGGGCAGATCTTGGAGCGTGCCCGTGATCAGGCACCTGTTCGC |
| | | CCCTCTGAAGGAGTATTTTGCCTGCGTGAGCAGCGGCAACTCCAATGCCA |
| | | ACAGCCGGGGCCCCTCTTTCAGCTCCGGATTGGTGCCTCTGAGCCTGAGG |
| | | GGCTCCCACATGGCAGCAATCCCCGCCCTGGACCCCGAGGCCGAGCCTA |
| | | GCATGGACGTGATCCTGGTGGGCTCTAGCGAGCTGTCCTCTAGCGTGTCT |
| | | CCAGGAACCGGAAGGGATCTGATCGCATACGAGGTGAAGGCCAATCAG |
| | | CGGAACATCGAGGACATCTGTATCTGCTGTGGCAGCCTGCAGGTGCACA |
| | | CACAGCACCCACTGTTCGAGGGAGGAATCTGCGCACCCTGTAAGGATAA |
| | | GTTCCTGGACGCCCTGTTTCTGTACGACGATGACGGCTACCAGTCCTATT |
| | | GCTCTATCTGCTGTTCCGGCGAGACCCTGCTGATCTGCGGCAATCCAGAT |
| | | TGTACAAGGTGCTATTGTTTTGAGTGCGTGGACTCTCTGGTGGGACCAGG |
| | | CACCAGCGGAAAGGTGCACGCCATGTCCAACTGGGTGTGCTACCTGTGC |
| | | CTGCCATCCTCTCGCAGCGGACTGCTGCAGCGGAGAAGGAAGTGGAGAT |
| | | CCCAGCTGAAGGCCTTCTATGATAGGGAGTCTGAGAACCCCCTGGAGAT |
| | | GTTTGAGACCGTGCCAGTGTGGCGCCGGCAGCCCGTGAGGGTGCTGAGC |
| | | CTGTTCGAGGATATCAAGAAGGAGCTGACATCCCTGGGCTTTCTGGAGTC |
| | | CGGCTCTGACCCCGGACAGCTGAAGCACGTGGTGGATGTGACCGACACA |
| | | GTGCGGAAGGATGTGGAGGAGTGGGGCCCTTTCGACCTGGTGTACGGA |
| | | GCAACCCCTCCACTGGGACACACATGCGACAGACCCCCTTCTTGGTACCT |
| | | GTTCCAGTTTCACCGCCTGCTGCAGTATGCAAGGCCAAAGCCAGGCAGCC |
| | | CTAGACCATTCTTTTGGATGTTCGTGGATAATCTGGTGCTGAACAAGGAG |
| | | GATCTGGACGTGGCCAGCAGGTTTCTGGAGATGGAGCCAGTGACCATCC |
| | | CAGACGTGCACGGCGGCTCCCTGCAGAATGCCGTGCGCGTGTGGTCTAA |
| | | CATCCCTGCCATCAGAAGCAGGCACTGGGCACTGGTGAGCGAGGAGGA |
| | | GCTGTCCCTGCTGGCCCAGAATAAGCAGAGCAGCAAGCTGGCCGCCAAG |
| | | TGGCCTACAAAGCTGGTGAAGAACTGCTTCCTGCCACTGCGGGAGTACTT |
| | | CAAGTATTTTTCCACCGAGCTGACATCTAGCCTGGGAGGACCCTCCTCTG |
| | | GCGCCCCACCACCTAGCGGCGGCTCCCCTGCCGGCTCTCCAACCAGCACA |
| | | GAGGAGGGCACCAGCGAGTCCGCCACACCAGAGTCTGGACCTGGCACCA |
| | | GCACAGAGCCATCCGAGGGCTCTGCCCCAGGCTCTCCTGCAGGCAGCCC |
| | | TACCTCCACCGAAGAGGGCACCAGCACAGAGCCTTCTGAGGGCAGCGCC |
| | | CCAGGCACCTCTACAGAGCCAAGCGAGCTCGAGGACAAGAAGTACAGCA |
| | | TCGGCCTGGCCATCGGCACCAACTCTGTGGGCTGGGCCGTGATCACCGA |
| | | CGAGTACAAGGTGCCCAGCAAGAAATTCAAGGTGCTGGGCAACACCGAC |
| | | CGGCACAGCATCAAGAAGAACCTGATCGGAGCCCTGCTGTTCGACAGCG |
| | | GCGAAACAGCCGAGGCCACCCGGCTGAAGAGAACCGCCAGAAGAAGAT |
| | | ACACCAGACGGAAGAACCGGATCTGCTATCTGCAAGAGATCTTCAGCAA |
| | | CGAGATGGCCAAGGTGGACGACAGCTTCTTCCACAGACTGGAAGAGTCC |
| | | TTCCTGGTGGAAGAGGATAAGAAGCACGAGCGGCACCCCATCTTCGGCA |
| | | ACATCGTGGACGAGGTGGCCTACCACGAGAAGTACCCCACCATCTACCAC |
| | | CTGAGAAAGAAACTGGTGGACAGCACCGACAAGGCCGACCTGCGGCTG |
| | | ATCTATCTGGCCCTGGCCCACATGATCAAGTTCCGGGGCCACTTCCTGAT |
| | | CGAGGGCGACCTGAACCCCGACAACAGCGACGTGGACAAGCTGTTCATC |
| | | CAGCTGGTGCAGACCTACAACCAGCTGTTCGAGGAAAACCCCATCAACG |
| | | CCAGCGGCGTGGACGCCAAGGCCATCCTGTCTGCCAGACTGAGCAAGAG |
| | | CAGACGGCTGGAAAATCTGATCGCCCAGCTGCCCGGCGAGAAGAAGAAT |
| | | GGCCTGTTCGGCAACCTGATTGCCCTGAGCCTGGGCCTGACCCCCAACTT |
| | | CAAGAGCAACTTCGACCTGGCCGAGGATGCCAAACTGCAGCTGAGCAAG |
| | | GACACCTACGACGACGACCTGGACAACCTGCTGGCCCAGATCGGCGACC |
| | | AGTACGCCGACCTGTTTCTGGCCGCCAAGAACCTGTCCGACGCCATCCTG |
| | | CTGAGCGACATCCTGAGAGTGAACACCGAGATCACCAAGGCCCCCCTGA |
| | | GCGCCTCTATGATCAAGAGATACGACGAGCACCACCAGGACCTGACCCT |
| | | GCTGAAAGCTCTCGTGCGGCAGCAGCTGCCTGAGAAGTACAAAGAGATT |
| | | TTCTTCGACCAGAGCAAGAACGGCTACGCCGGCTACATTGACGGCGGAG |
| | | CCAGCCAGGAAGAGTTCTACAAGTTCATCAAGCCCATCCTGGAAAAGAT |
| | | GGACGGCACCGAGGAACTGCTCGTGAAGCTGAACAGAGAGGACCTGCT |
| | | GCGGAAGCAGCGGACCTTCGACAACGGCAGCATCCCCCACCAGATCCAC |
| | | CTGGGAGAGCTGCACGCCATTCTGCGGCGGCAGGAAGATTTTTACCCATT |
| | | CCTGAAGGACAACCGGGAAAAGATCGAGAAGATCCTGACCTTCCGCATC |
| | | CCCTACTACGTGGGCCCTCTGGCCAGGGGAAACAGCAGATTCGCCTGGA |
| | | TGACCAGAAAGAGCGAGGAAACCATCACCCCCTGGAACTTCGAGGAAGT |
| | | GGTGGACAAGGGCGCTTCCGCCCAGAGCTTCATCGAGCGGATGACCAAC |
| | | TTCGATAAGAACCTGCCCAACGAGAAGGTGCTGCCCAAGCACAGCCTGC |
| | | TGTACGAGTACTTCACCGTGTATAACGAGCTGACCAAAGTGAAATACGTG |
| | | ACCGAGGGAATGAGAAAGCCCGCCTTCCTGAGCGGCGAGCAGAAAAAG |
| | | GCCATCGTGGACCTGCTGTTCAAGACCAACCGGAAAGTGACCGTGAAGC |
| | | AGCTGAAAGAGGACTACTTCAAGAAAATCGAGTGCTTCGACTCCGTGGA |
| | | AATCTCCGGCGTGGAAGATCGGTTCAACGCCTCCCTGGGCACATACCACG |
| | | ATCTGCTGAAAATTATCAAGGACAAGGACTTCCTGGACAATGAGGAAAA |
| | | CGAGGACATTCTGGAAGATATCGTGCTGACCCTGACACTGTTTGAGGAC |
| | | AGAGAGATGATCGAGGAACGGCTGAAAACCTATGCCCACCTGTTCGACG |
| | | ACAAAGTGATGAAGCAGCTGAAGCGGCGGAGATACACCGGCTGGGGCA |
| | | GGCTGAGCCGGAAGCTGATCAACGGCATCCGGGACAAGCAGTCCGGCA |
| | | AGACAATCCTGGATTTCCTGAAGTCCGACGGCTTCGCCAACAGAAACTTC |
| | | ATGCAGCTGATCCACGACGACAGCCTGACCTTTAAAGAGGACATCCAGA |
| | | AAGCCCAGGTGTCCGGCCAGGGCGATAGCCTGCACGAGCACATTGCCAA |
| | | TCTGGCCGGCAGCCCCGCCATTAAGAAGGGCATCCTGCAGACAGTGAAG |
| | | GTGGTGGACGAGCTCGTGAAAGTGATGGGCCGGCACAAGCCCGAGAAC |
| | | ATCGTGATCGAAATGGCCAGAGAGAACCAGACCACCCAGAAGGGACAG |
| | | AAGAACAGCCGCGAGAGAATGAAGCGGATCGAAGAGGGCATCAAAGAG |
| | | CTGGGCAGCCAGATCCTGAAAGAACACCCCGTGGAAAACACCCAGCTGC |
| | | AGAACGAGAAGCTGTACCTGTACTACCTGCAGAATGGGCGGGATATGTA |
| | | CGTGGACCAGGAACTGGACATCAACCGGCTGTCCGACTACGATGTGGAC |
| | | GCCATCGTGCCTCAGAGCTTTCTGAAGGACGACTCCATCGACAACAAGGT |
| | | GCTGACCAGAAGCGACAAGAACCGGGGCAAGAGCGACAACGTGCCCTC |
| | | CGAAGAGGTCGTGAAGAAGATGAAGAACTACTGGCGGCAGCTGCTGAA |
| | | CGCCAAGCTGATTACCCAGAGAAAGTTCGACAATCTGACCAAGGCCGAG |
| | | AGAGGCGGCCTGAGCGAACTGGATAAGGCCGGCTTCATCAAGAGACAG |
| | | CTGGTGGAAACCCGGCAGATCACAAAGCACGTGGCACAGATCCTGGACT |
| | | CCCGGATGAACACTAAGTACGACGAGAATGACAAGCTGATCCGGGAAGT |
| | | GAAAGTGATCACCCTGAAGTCCAAGCTGGTGTCCGATTTCCGGAAGGAT |
| | | TTCCAGTTTTACAAAGTGCGCGAGATCAACAACTACCACCACGCCCACGA |
| | | CGCCTACCTGAACGCCGTCGTGGGAACCGCCCTGATCAAAAAGTACCCTA |
| | | AGCTGGAAAGCGAGTTCGTGTACGGCGACTACAAGGTGTACGACGTGCG |
| | | GAAGATGATCGCCAAGAGCGAGCAGGAAATCGGCAAGGCTACCGCCAA |
| | | GTACTTCTTCTACAGCAACATCATGAACTTTTTCAAGACCGAGATTACCCT |
| | | GGCCAACGGCGAGATCCGGAAGCGGCCTCTGATCGAGACAAACGGCGA |
| | | AACCGGGGAGATCGTGTGGGATAAGGGCCGGGATTTTGCCACCGTGCG |
| | | GAAAGTGCTGAGCATGCCCCAAGTGAATATCGTGAAAAAGACCGAGGTG |
| | | CAGACAGGCGGCTTCAGCAAAGAGTCTATCCTGCCCAAGAGGAACAGCG |
| | | ATAAGCTGATCGCCAGAAAGAAGGACTGGGACCCTAAGAAGTACGGCG |
| | | GCTTCGACAGCCCCACCGTGGCCTATTCTGTGCTGGTGGTGGCCAAAGTG |
| | | GAAAAGGGCAAGTCCAAGAAACTGAAGAGTGTGAAAGAGCTGCTGGGG |
| | | ATCACCATCATGGAAAGAAGCAGCTTCGAGAAGAATCCCATCGACTTTCT |
| | | GGAAGCCAAGGGCTACAAAGAAGTGAAAAAGGACCTGATCATCAAGCT |
| | | GCCTAAGTACTCCCTGTTCGAGCTGGAAAACGGCCGGAAGAGAATGCTG |
| | | GCCTCTGCCGGCGAACTGCAGAAGGGAAACGAACTGGCCCTGCCCTCCA |
| | | AATATGTGAACTTCCTGTACCTGGCCAGCCACTATGAGAAGCTGAAGGGC |
| | | TCCCCCGAGGATAATGAGCAGAAACAGCTGTTTGTGGAACAGCACAAGC |
| | | ACTACCTGGACGAGATCATCGAGCAGATCAGCGAGTTCTCCAAGAGAGT |
| | | GATCCTGGCCGACGCTAATCTGGACAAAGTGCTGTCCGCCTACAACAAGC |
| | | ACCGGGATAAGCCCATCAGAGAGCAGGCCGAGAATATCATCCACCTGTT |
| | | TACCCTGACCAATCTGGGAGCCCCTGCCGCCTTCAAGTACTTTGACACCA |
| | | CCATCGACCGGAAGAGGTACACCAGCACCAAAGAGGTGCTGGACGCCAC |
| | | CCTGATCCACCAGAGCATCACCGGCCTGTACGAGACACGGATCGACCTGT |
| | | CTCAGCTGGGAGGCGACAGCCCCAAGAAGAAGAGAAAGGTGGGAGTCG |
| | | ACGGATCCAGCGGCTCCGAGACCCCAGGCACATCTGAGAGCGCCACCCC |
| | | TGAGTCCACCGGTGACTCCGTTGCTTTCGAGGACGTGGCCGTGAACTTCA |
| | | CACTTGAGGAATGGGCCTTGCTCGACCCAAGTCAGAAGAATCTGTACAG |
| | | AGACGTGATGCGGGAGACATTCAGGAATCTCGCCAGTGTCGGAAAGCAG |
| | | TGGGAAGACCAGAACATCGAAGATCCTTTCAAGATACCACGGCGCAATA |
| | | TCTCCCACATTCCTGAGAGGCTGTGTGAATCTAAGGAAGGCGGACAAGG |
| | | TGAGGAAAGCGCTGATTACAAAGATGATGACGATAAAGCCCCCAAGAAG |
| | | AAAAGGAAGGTCCCAAAGAAAAAAAGAAAGGTGTGA |
| 1762 | Fusion Protein | MYPYDVPDYASPKKKRKVNHDQEFDPPKVYPPVPAEKRKPIRVLSLFDGIAT |
| | 13 Amino Acid | GLLVLKDLGIQVDRYIASEVCEDSITVGMVRHQGKIMYVGDVRSVTQKHIQE |
| | Sequence | WGPFDLVIGGSPCNDLSIVNPARKGLYEGTGRLFFEFYRLLHDARPKEGDDR |
| | NLS-3A-ADD-h3L- | PFFWLFENVVAMGVSDKRDISRFLESNPVMIDAKEVSAAHRARYFWGNLP |
| | dCas9-NLS- | GMNRPLASTVNDKLELQECLEHGRIAKFSKVRTITTRSNSIKQGKDQHFPVF |
| | KOX1KRAB | MNEKEDILWCTEMERVFGFPVHYTDVSNMSRLARQRLLGRSWSVPVIRHLF |
| | | APLKEYFACVSSGNSNANSRGPSFSSGLVPLSLRGSHMAAIPALDPEAEPSM |
| | | DVILVGSSELSSSVSPGTGRDLIAYEVKANQRNIEDICICCGSLQVHTQHPLFE |
| | | GGICAPCKDKFLDALFLYDDDGYQSYCSICCSGETLLICGNPDCTRCYCFECVD |
| | | SLVGPGTSGKVHAMSNWVCYLCLPSSRSGLLQRRRKWRSQLKAFYDRESEN |
| | | PLEMFETVPVWRRQPVRVLSLFEDIKKELTSLGFLESGSDPGQLKHVVDVTD |
| | | TVRKDVEEWGPFDLVYGATPPLGHTCDRPPSWYLFQFHRLLQYARPKPGSP |
| | | RPFFWMFVDNLVLNKEDLDVASRFLEMEPVTIPDVHGGSLQNAVRVWSNI |
| | | PAIRSRHWALVSEEELSLLAQNKQSSKLAAKWPTKLVKNCFLPLREYFKYFSTE |
| | | LTSSLGGPSSGAPPPSGGSPAGSPTSTEEGTSESATPESGPGTSTEPSEGSAPG |
| | | SPAGSPTSTEEGTSTEPSEGSAPGTSTEPSELEDKKYSIGLAIGTNSVGWAVIT |
| | | DEYKVPSKKFKVLGNTDRHSIKKNLIGALLFDSGETAEATRLKRTARRRYTRRK |
| | | NRICYLQEIFSNEMAKVDDSFFHRLEESFLVEEDKKHERHPIFGNIVDEVAYHE |
| | | KYPTIYHLRKKLVDSTDKADLRLIYLALAHMIKFRGHFLIEGDLNPDNSDVDKL |
| | | FIQLVQTYNQLFEENPINASGVDAKAILSARLSKSRRLENLIAQLPGEKKNGLF |
| | | GNLIALSLGLTPNFKSNFDLAEDAKLQLSKDTYDDDLDNLLAQIGDQYADLFL |
| | | AAKNLSDAILLSDILRVNTEITKAPLSASMIKRYDEHHQDLTLLKALVRQQLPE |
| | | KYKEIFFDQSKNGYAGYIDGGASQEEFYKFIKPILEKMDGTEELLVKLNREDLL |
| | | RKQRTFDNGSIPHQIHLGELHAILRRQEDFYPFLKDNREKIEKILTFRIPYYVGP |
| | | LARGNSRFAWMTRKSEETITPWNFEEVVDKGASAQSFIERMTNFDKNLPNE |
| | | KVLPKHSLLYEYFTVYNELTKVKYVTEGMRKPAFLSGEQKKAIVDLLFKTNRKV |
| | | TVKQLKEDYFKKIECFDSVEISGVEDRFNASLGTYHDLLKIIKDKDFLDNEENE |
| | | DILEDIVLTLTLFEDREMIEERLKTYAHLFDDKVMKQLKRRRYTGWGRLSRKLI |
| | | NGIRDKQSGKTILDFLKSDGFANRNFMQLIHDDSLTFKEDIQKAQVSGQGDS |
| | | LHEHIANLAGSPAIKKGILQTVKVVDELVKVMGRHKPENIVIEMARENQTTQ |
| | | KGQKNSRERMKRIEEGIKELGSQILKEHPVENTQLQNEKLYLYYLQNGRDMY |
| | | VDQELDINRLSDYDVDAIVPQSFLKDDSIDNKVLTRSDKNRGKSDNVPSEEV |
| | | VKKMKNYWRQLLNAKLITQRKFDNLTKAERGGLSELDKAGFIKRQLVETRQI |
| | | TKHVAQILDSRMNTKYDENDKLIREVKVITLKSKLVSDFRKDFQFYKVREINNY |
| | | HHAHDAYLNAVVGTALIKKYPKLESEFVYGDYKVYDVRKMIAKSEQEIGKAT |
| | | AKYFFYSNIMNFFKTEITLANGEIRKRPLIETNGETGEIVWDKGRDFATVRKVL |
| | | SMPQVNIVKKTEVQTGGFSKESILPKRNSDKLIARKKDWDPKKYGGFDSPTV |
| | | AYSVLVVAKVEKGKSKKLKSVKELLGITIMERSSFEKNPIDFLEAKGYKEVKKDL |
| | | IIKLPKYSLFELENGRKRMLASAGELQKGNELALPSKYVNFLYLASHYEKLKGS |
| | | PEDNEQKQLFVEQHKHYLDEIIEQISEFSKRVILADANLDKVLSAYNKHRDKPI |
| | | REQAENIIHLFTLTNLGAPAAFKYFDTTIDRKRYTSTKEVLDATLIHQSITGLYE |
| | | TRIDLSQLGGDSPKKKRKVGVDGSSGSETPGTSESATPESRTLVTFKDVFVDFT |
| | | REEWKLLDTAQQIVYRNVMLENYKNLVSLGYQLTKPDVILRLEKGEEPWLV |
| 1763 | Fusion Protein | ATGTACCCATACGATGTTCCAGATTACGCTTCGCCGAAGAAAAAGCGCAA |
| | 13 DNA Sequence | GGTCAATCACGATCAGGAGTTCGACCCCCCTAAGGTGTACCCACCAGTGC |
| | | CTGCAGAGAAGAGGAAGCCAATCCGGGTGCTGAGCCTGTTTGATGGCAT |
| | | CGCCACCGGCCTGCTGGTGCTGAAGGATCTGGGCATCCAGGTGGACCGG |
| | | TACATCGCCTCCGAGGTGTGCGAGGATTCTATCACCGTGGGCATGGTGC |
| | | GCCACCAGGGCAAGATCATGTATGTGGGCGACGTGCGGTCCGTGACACA |
| | | GAAGCACATCCAGGAGTGGGGCCCATTCGATCTGGTGATCGGCGGCAGC |
| | | CCCTGTAATGACCTGTCCATCGTGAACCCTGCAAGGAAGGGACTGTACGA |
| | | GGGAACCGGCCGGCTGTTCTTTGAGTTTTATAGACTGCTGCACGACGCCA |
| | | GGCCTAAGGAGGGCGACGATAGACCATTCTTTTGGCTGTTCGAGAATGT |
| | | GGTGGCTATGGGCGTGAGCGATAAGAGGGACATCTCCAGGTTTCTGGAG |
| | | TCTAACCCCGTGATGATCGATGCAAAGGAGGTGTCCGCCGCACACAGAG |
| | | CCAGGTATTTCTGGGGCAATCTGCCAGGAATGAACAGGCCACTGGCAAG |
| | | CACCGTGAATGACAAGCTGGAGCTGCAGGAGTGCCTGGAGCACGGAAG |
| | | GATCGCCAAGTTTTCCAAGGTGCGCACAATCACCACACGGAGCAATTCCA |
| | | TCAAGCAGGGCAAGGATCAGCACTTCCCCGTGTTCATGAACGAGAAGGA |
| | | GGACATCCTGTGGTGTACCGAGATGGAGAGAGTGTTCGGCTTTCCAGTG |
| | | CACTACACAGACGTGTCTAACATGAGCAGGCTGGCAAGGCAGCGGCTGC |
| | | TGGGCAGATCTTGGAGCGTGCCCGTGATCAGGCACCTGTTCGCCCCTCTG |
| | | AAGGAGTATTTTGCCTGCGTGAGCAGCGGCAACTCCAATGCCAACAGCC |
| | | GGGGCCCCTCTTTCAGCTCCGGATTGGTGCCTCTGAGCCTGAGGGGCTCC |
| | | CACATGGCAGCAATCCCCGCCCTGGACCCCGAGGCCGAGCCTAGCATGG |
| | | ACGTGATCCTGGTGGGCTCTAGCGAGCTGTCCTCTAGCGTGTCTCCAGGA |
| | | ACCGGAAGGGATCTGATCGCATACGAGGTGAAGGCCAATCAGCGGAAC |
| | | ATCGAGGACATCTGTATCTGCTGTGGCAGCCTGCAGGTGCACACACAGC |
| | | ACCCACTGTTCGAGGGAGGAATCTGCGCACCCTGTAAGGATAAGTTCCT |
| | | GGACGCCCTGTTTCTGTACGACGATGACGGCTACCAGTCCTATTGCTCTA |
| | | TCTGCTGTTCCGGCGAGACCCTGCTGATCTGCGGCAATCCAGATTGTACA |
| | | AGGTGCTATTGTTTTGAGTGCGTGGACTCTCTGGTGGGACCAGGCACCA |
| | | GCGGAAAGGTGCACGCCATGTCCAACTGGGTGTGCTACCTGTGCCTGCC |
| | | ATCCTCTCGCAGCGGACTGCTGCAGCGGAGAAGGAAGTGGAGATCCCAG |
| | | CTGAAGGCCTTCTATGATAGGGAGTCTGAGAACCCCCTGGAGATGTTTG |
| | | AGACCGTGCCAGTGTGGCGCCGGCAGCCCGTGAGGGTGCTGAGCCTGTT |
| | | CGAGGATATCAAGAAGGAGCTGACATCCCTGGGCTTTCTGGAGTCCGGC |
| | | TCTGACCCCGGACAGCTGAAGCACGTGGTGGATGTGACCGACACAGTGC |
| | | GGAAGGATGTGGAGGAGTGGGGCCCTTTCGACCTGGTGTACGGAGCAA |
| | | CCCCTCCACTGGGACACACATGCGACAGACCCCCTTCTTGGTACCTGTTCC |
| | | AGTTTCACCGCCTGCTGCAGTATGCAAGGCCAAAGCCAGGCAGCCCTAG |
| | | ACCATTCTTTTGGATGTTCGTGGATAATCTGGTGCTGAACAAGGAGGATC |
| | | TGGACGTGGCCAGCAGGTTTCTGGAGATGGAGCCAGTGACCATCCCAGA |
| | | CGTGCACGGCGGCTCCCTGCAGAATGCCGTGCGCGTGTGGTCTAACATC |
| | | CCTGCCATCAGAAGCAGGCACTGGGCACTGGTGAGCGAGGAGGAGCTG |
| | | TCCCTGCTGGCCCAGAATAAGCAGAGCAGCAAGCTGGCCGCCAAGTGGC |
| | | CTACAAAGCTGGTGAAGAACTGCTTCCTGCCACTGCGGGAGTACTTCAAG |
| | | TATTTTTCCACCGAGCTGACATCTAGCCTGGGAGGACCCTCCTCTGGCGC |
| | | CCCACCACCTAGCGGCGGCTCCCCTGCCGGCTCTCCAACCAGCACAGAGG |
| | | AGGGCACCAGCGAGTCCGCCACACCAGAGTCTGGACCTGGCACCAGCAC |
| | | AGAGCCATCCGAGGGCTCTGCCCCAGGCTCTCCTGCAGGCAGCCCTACCT |
| | | CCACCGAAGAGGGCACCAGCACAGAGCCTTCTGAGGGCAGCGCCCCAG |
| | | GCACCTCTACAGAGCCAAGCGAGCTCGAGGACAAGAAGTACAGCATCGG |
| | | CCTGGCCATCGGCACCAACTCTGTGGGCTGGGCCGTGATCACCGACGAG |
| | | TACAAGGTGCCCAGCAAGAAATTCAAGGTGCTGGGCAACACCGACCGGC |
| | | ACAGCATCAAGAAGAACCTGATCGGAGCCCTGCTGTTCGACAGCGGCGA |
| | | AACAGCCGAGGCCACCCGGCTGAAGAGAACCGCCAGAAGAAGATACAC |
| | | CAGACGGAAGAACCGGATCTGCTATCTGCAAGAGATCTTCAGCAACGAG |
| | | ATGGCCAAGGTGGACGACAGCTTCTTCCACAGACTGGAAGAGTCCTTCCT |
| | | GGTGGAAGAGGATAAGAAGCACGAGCGGCACCCCATCTTCGGCAACATC |
| | | GTGGACGAGGTGGCCTACCACGAGAAGTACCCCACCATCTACCACCTGA |
| | | GAAAGAAACTGGTGGACAGCACCGACAAGGCCGACCTGCGGCTGATCTA |
| | | TCTGGCCCTGGCCCACATGATCAAGTTCCGGGGCCACTTCCTGATCGAGG |
| | | GCGACCTGAACCCCGACAACAGCGACGTGGACAAGCTGTTCATCCAGCT |
| | | GGTGCAGACCTACAACCAGCTGTTCGAGGAAAACCCCATCAACGCCAGC |
| | | GGCGTGGACGCCAAGGCCATCCTGTCTGCCAGACTGAGCAAGAGCAGAC |
| | | GGCTGGAAAATCTGATCGCCCAGCTGCCCGGCGAGAAGAAGAATGGCCT |
| | | GTTCGGCAACCTGATTGCCCTGAGCCTGGGCCTGACCCCCAACTTCAAGA |
| | | GCAACTTCGACCTGGCCGAGGATGCCAAACTGCAGCTGAGCAAGGACAC |
| | | CTACGACGACGACCTGGACAACCTGCTGGCCCAGATCGGCGACCAGTAC |
| | | GCCGACCTGTTTCTGGCCGCCAAGAACCTGTCCGACGCCATCCTGCTGAG |
| | | CGACATCCTGAGAGTGAACACCGAGATCACCAAGGCCCCCCTGAGCGCC |
| | | TCTATGATCAAGAGATACGACGAGCACCACCAGGACCTGACCCTGCTGA |
| | | AAGCTCTCGTGCGGCAGCAGCTGCCTGAGAAGTACAAAGAGATTTTCTTC |
| | | GACCAGAGCAAGAACGGCTACGCCGGCTACATTGACGGCGGAGCCAGC |
| | | CAGGAAGAGTTCTACAAGTTCATCAAGCCCATCCTGGAAAAGATGGACG |
| | | GCACCGAGGAACTGCTCGTGAAGCTGAACAGAGAGGACCTGCTGCGGA |
| | | AGCAGCGGACCTTCGACAACGGCAGCATCCCCCACCAGATCCACCTGGG |
| | | AGAGCTGCACGCCATTCTGCGGCGGCAGGAAGATTITTACCCATTCCTGA |
| | | AGGACAACCGGGAAAAGATCGAGAAGATCCTGACCTTCCGCATCCCCTA |
| | | CTACGTGGGCCCTCTGGCCAGGGGAAACAGCAGATTCGCCTGGATGACC |
| | | AGAAAGAGCGAGGAAACCATCACCCCCTGGAACTTCGAGGAAGTGGTG |
| | | GACAAGGGCGCTTCCGCCCAGAGCTTCATCGAGCGGATGACCAACTTCG |
| | | ATAAGAACCTGCCCAACGAGAAGGTGCTGCCCAAGCACAGCCTGCTGTA |
| | | CGAGTACTTCACCGTGTATAACGAGCTGACCAAAGTGAAATACGTGACC |
| | | GAGGGAATGAGAAAGCCCGCCTTCCTGAGCGGCGAGCAGAAAAAGGCC |
| | | ATCGTGGACCTGCTGTTCAAGACCAACCGGAAAGTGACCGTGAAGCAGC |
| | | TGAAAGAGGACTACTTCAAGAAAATCGAGTGCTTCGACTCCGTGGAAAT |
| | | CTCCGGCGTGGAAGATCGGTTCAACGCCTCCCTGGGCACATACCACGATC |
| | | TGCTGAAAATTATCAAGGACAAGGACTTCCTGGACAATGAGGAAAACGA |
| | | GGACATTCTGGAAGATATCGTGCTGACCCTGACACTGTTTGAGGACAGA |
| | | GAGATGATCGAGGAACGGCTGAAAACCTATGCCCACCTGTTCGACGACA |
| | | AAGTGATGAAGCAGCTGAAGCGGCGGAGATACACCGGCTGGGGCAGGC |
| | | TGAGCCGGAAGCTGATCAACGGCATCCGGGACAAGCAGTCCGGCAAGA |
| | | CAATCCTGGATTTCCTGAAGTCCGACGGCTTCGCCAACAGAAACTTCATG |
| | | CAGCTGATCCACGACGACAGCCTGACCTTTAAAGAGGACATCCAGAAAG |
| | | CCCAGGTGTCCGGCCAGGGCGATAGCCTGCACGAGCACATTGCCAATCT |
| | | GGCCGGCAGCCCCGCCATTAAGAAGGGCATCCTGCAGACAGTGAAGGTG |
| | | GTGGACGAGCTCGTGAAAGTGATGGGCCGGCACAAGCCCGAGAACATC |
| | | GTGATCGAAATGGCCAGAGAGAACCAGACCACCCAGAAGGGACAGAAG |
| | | AACAGCCGCGAGAGAATGAAGCGGATCGAAGAGGGCATCAAAGAGCTG |
| | | GGCAGCCAGATCCTGAAAGAACACCCCGTGGAAAACACCCAGCTGCAGA |
| | | ACGAGAAGCTGTACCTGTACTACCTGCAGAATGGGCGGGATATGTACGT |
| | | GGACCAGGAACTGGACATCAACCGGCTGTCCGACTACGATGTGGACGCC |
| | | ATCGTGCCTCAGAGCTTTCTGAAGGACGACTCCATCGACAACAAGGTGCT |
| | | GACCAGAAGCGACAAGAACCGGGGCAAGAGCGACAACGTGCCCTCCGA |
| | | AGAGGTCGTGAAGAAGATGAAGAACTACTGGCGGCAGCTGCTGAACGC |
| | | CAAGCTGATTACCCAGAGAAAGTTCGACAATCTGACCAAGGCCGAGAGA |
| | | GGCGGCCTGAGCGAACTGGATAAGGCCGGCTTCATCAAGAGACAGCTG |
| | | GTGGAAACCCGGCAGATCACAAAGCACGTGGCACAGATCCTGGACTCCC |
| | | GGATGAACACTAAGTACGACGAGAATGACAAGCTGATCCGGGAAGTGA |
| | | AAGTGATCACCCTGAAGTCCAAGCTGGTGTCCGATTTCCGGAAGGATTTC |
| | | CAGTTTTACAAAGTGCGCGAGATCAACAACTACCACCACGCCCACGACGC |
| | | CTACCTGAACGCCGTCGTGGGAACCGCCCTGATCAAAAAGTACCCTAAGC |
| | | TGGAAAGCGAGTTCGTGTACGGCGACTACAAGGTGTACGACGTGCGGAA |
| | | GATGATCGCCAAGAGCGAGCAGGAAATCGGCAAGGCTACCGCCAAGTA |
| | | CTTCTTCTACAGCAACATCATGAACTTTTTCAAGACCGAGATTACCCTGGC |
| | | CAACGGCGAGATCCGGAAGCGGCCTCTGATCGAGACAAACGGCGAAAC |
| | | CGGGGAGATCGTGTGGGATAAGGGCCGGGATTTTGCCACCGTGCGGAA |
| | | AGTGCTGAGCATGCCCCAAGTGAATATCGTGAAAAAGACCGAGGTGCAG |
| | | ACAGGCGGCTTCAGCAAAGAGTCTATCCTGCCCAAGAGGAACAGCGATA |
| | | AGCTGATCGCCAGAAAGAAGGACTGGGACCCTAAGAAGTACGGCGGCTT |
| | | CGACAGCCCCACCGTGGCCTATTCTGTGCTGGTGGTGGCCAAAGTGGAA |
| | | AAGGGCAAGTCCAAGAAACTGAAGAGTGTGAAAGAGCTGCTGGGGATC |
| | | ACCATCATGGAAAGAAGCAGCTTCGAGAAGAATCCCATCGACTTTCTGGA |
| | | AGCCAAGGGCTACAAAGAAGTGAAAAAGGACCTGATCATCAAGCTGCCT |
| | | AAGTACTCCCTGTTCGAGCTGGAAAACGGCCGGAAGAGAATGCTGGCCT |
| | | CTGCCGGCGAACTGCAGAAGGGAAACGAACTGGCCCTGCCCTCCAAATA |
| | | TGTGAACTTCCTGTACCTGGCCAGCCACTATGAGAAGCTGAAGGGCTCCC |
| | | CCGAGGATAATGAGCAGAAACAGCTGTTTGTGGAACAGCACAAGCACTA |
| | | CCTGGACGAGATCATCGAGCAGATCAGCGAGTTCTCCAAGAGAGTGATC |
| | | CTGGCCGACGCTAATCTGGACAAAGTGCTGTCCGCCTACAACAAGCACCG |
| | | GGATAAGCCCATCAGAGAGCAGGCCGAGAATATCATCCACCTGTTTACCC |
| | | TGACCAATCTGGGAGCCCCTGCCGCCTTCAAGTACTTTGACACCACCATC |
| | | GACCGGAAGAGGTACACCAGCACCAAAGAGGTGCTGGACGCCACCCTG |
| | | ATCCACCAGAGCATCACCGGCCTGTACGAGACACGGATCGACCTGTCTCA |
| | | GCTGGGAGGCGACAGCCCCAAGAAGAAGAGAAAGGTGGGAGTCGACG |
| | | GATCCAGCGGCTCCGAGACCCCAGGCACATCTGAGAGCGCCACCCCTGA |
| | | GTCCCGGACCCTGGTGACATTCAAGGACGTGTTCGTGGACTTCACCCGG |
| | | GAGGAGTGGAAGCTGCTGGACACAGCCCAGCAGATCGTGTACAGGAAC |
| | | GTGATGCTGGAGAACTATAAGAATCTGGTGTCTCTGGGCTACCAGCTGA |
| | | CAAAGCCAGATGTGATCCTGCGGCTGGAGAAGGGAGAGGAGCCCTGGC |
| | | TGGTGTAG |
| 1764 | Fusion Protein | MGTMNHDQEFDPPKVYPPVPAEKRKPIRVLSLFDGIATGLLVLKDLGIQVDR |
| | 14 Amino Acid | YIASEVCEDSITVGMVRHQGKIMYVGDVRSVTQKHIQEWGPFDLVIGGSPC |
| | Sequence | NDLSIVNPARKGLYEGTGRLFFEFYRLLHDARPKEGDDRPFFWLFENVVAM |
| | 3A-3L-NLS- | GVSDKRDISRFLESNPVMIDAKEVSAAHRARYFWGNLPGMNRPLASTVND |
| | dCas9-NLS- | KLELQECLEHGRIAKFSKVRTITTRSNSIKQGKDQHFPVFMNEKEDILWCTEM |
| | KOX1KRAB | ERVFGFPVHYTDVSNMSRLARQRLLGRSWSVPVIRHLFAPLKEYFACVSSGN |
| | | SNANSRGPSFSSGLVPLSLRGSHMGPMEIYKTVSAWKRQPVRVLSLFRNIDK |
| | | VLKSLGFLESGSGSGGGTLKYVEDVTNVVRRDVEKWGPFDLVYGSTQPLGSS |
| | | CDRCPGWYMFQFHRILQYALPRQESQRPFFWIFMDNLLLTEDDQETTTRFL |
| | | QTEAVTLQDVRGRDYQNAMRVWSNIPGLKSKHAPLTPKEEEYLQAQVRSR |
| | | SKLDAPKVDLLVKNCLLPLREYFKYFSQNSLPLGGPSSGAPPPSGGSPAGSPTS |
| | | TEEGTSESATPESGPGTSTEPSEGSAPGSPAGSPTSTEEGTSTEPSEGSAPGTS |
| | | TEPSEPKKKRKVYMDKKYSIGLAIGTNSVGWAVITDEYKVPSKKFKVLGNTDR |
| | | HSIKKNLIGALLFDSGETAEATRLKRTARRRYTRRKNRICYLQEIFSNEMAKVD |
| | | DSFFHRLEESFLVEEDKKHERHPIFGNIVDEVAYHEKYPTIYHLRKKLVDSTDK |
| | | ADLRLIYLALAHMIKFRGHFLIEGDLNPDNSDVDKLFIQLVQTYNQLFEENPIN |
| | | ASGVDAKAILSARLSKSRRLENLIAQLPGEKKNGLFGNLIALSLGLTPNFKSNF |
| | | DLAEDAKLQLSKDTYDDDLDNLLAQIGDQYADLFLAAKNLSDAILLSDILRVN |
| | | TEITKAPLSASMIKRYDEHHQDLTLLKALVRQQLPEKYKEIFFDQSKNGYAGYI |
| | | DGGASQEEFYKFIKPILEKMDGTEELLVKLNREDLLRKQRTFDNGSIPHQIHL |
| | | GELHAILRRQEDFYPFLKDNREKIEKILTFRIPYYVGPLARGNSRFAWMTRKSE |
| | | ETITPWNFEEVVDKGASAQSFIERMTNFDKNLPNEKVLPKHSLLYEYFTVYNE |
| | | LTKVKYVTEGMRKPAFLSGEQKKAIVDLLFKTNRKVTVKQLKEDYFKKIECFDS |
| | | VEISGVEDRFNASLGTYHDLLKIIKDKDFLDNEENEDILEDIVLTLTLFEDREMI |
| | | EERLKTYAHLFDDKVMKQLKRRRYTGWGRLSRKLINGIRDKQSGKTILDFLKSD |
| | | GFANRNFMQLIHDDSLTFKEDIQKAQVSGQGDSLHEHIANLAGSPAIKKGIL |
| | | QTVKVVDELVKVMGRHKPENIVIEMARENQTTQKGQKNSRERMKRIEEGIK |
| | | ELGSQILKEHPVENTQLQNEKLYLYYLQNGRDMYVDQELDINRLSDYDVDAI |
| | | VPQSFLKDDSIDNKVLTRSDKNRGKSDNVPSEEVVKKMKNYWRQLLNAKLIT |
| | | QRKFDNLTKAERGGLSELDKAGFIKRQLVETRQITKHVAQILDSRMNTKYDE |
| | | NDKLIREVKVITLKSKLVSDFRKDFQFYKVREINNYHHAHDAYLNAVVGTALIK |
| | | KYPKLESEFVYGDYKVYDVRKMIAKSEQEIGKATAKYFFYSNIMNFFKTEITLA |
| | | NGEIRKRPLIETNGETGEIVWDKGRDFATVRKVLSMPQVNIVKKTEVQTGGF |
| | | SKESILPKRNSDKLIARKKDWDPKKYGGFDSPTVAYSVLVVAKVEKGKSKKLK |
| | | SVKELLGITIMERSSFEKNPIDFLEAKGYKEVKKDLIIKLPKYSLFELENGRKRM |
| | | LASAGELQKGNELALPSKYVNFLYLASHYEKLKGSPEDNEQKQLFVEQHKHYL |
| | | DEIIEQISEFSKRVILADANLDKVLSAYNKHRDKPIREQAENIIHLFTLTNLGAP |
| | | AAFKYFDTTIDRKRYTSTKEVLDATLIHQSITGLYETRIDLSQLGGDPKKKRKVS |
| | | GSETPGTSESATPESTGRTLVTFKDVFVDFTREEWKLLDTAQQIVYRNVMLE |
| | | NYKNLVSLGYQLTKPDVILRLEKGEEP |
| 1765 | Fusion Protein | ATGGGTACCATGAACCATGACCAGGAATTTGACCCCCCAAAGGTTTACCC |
| | 14 DNA Sequence | ACCTGTGCCAGCTGAGAAGAGGAAGCCCATCCGCGTGCTGTCTCTCTTTG |
| | | ATGGGATTGCTACAGGGCTCCTGGTGCTGAAGGACCTGGGCATCCAAGT |
| | | GGACCGCTACATTGCCTCCGAGGTGTGTGAGGACTCCATCACGGTGGGC |
| | | ATGGTGCGGCACCAGGGAAAGATCATGTACGTCGGGGACGTCCGCAGC |
| | | GTCACACAGAAGCATATCCAGGAGTGGGGCCCATTCGACCTGGTGATTG |
| | | GAGGCAGTCCCTGCAATGACCTCTCCATTGTCAACCCTGCCCGCAAGGGA |
| | | CTTTATGAGGGTACTGGCCGCCTCTTCTTTGAGTTCTACCGCCTCCTGCAT |
| | | GATGCGCGGCCCAAGGAGGGAGATGATCGCCCCTTCTTCTGGCTCTTTGA |
| | | GAATGTGGTGGCCATGGGCGTTAGTGACAAGAGGGACATCTCGCGATTT |
| | | CTTGAGTCTAACCCCGTGATGATTGACGCCAAAGAAGTGTCTGCTGCACA |
| | | CAGGGCCCGTTACTTCTGGGGTAACCTTCCTGGCATGAACAGGCCTTTGG |
| | | CATCCACTGTGAATGATAAGCTGGAGCTGCAAGAGTGTCTGGAGCACGG |
| | | CAGAATAGCCAAGTTCAGCAAAGTGAGGACCATTACCACCAGGTCAAAC |
| | | TCTATAAAGCAGGGCAAAGACCAGCATTTCCCCGTCTTCATGAACGAGAA |
| | | GGAGGACATCCTGTGGTGCACTGAAATGGAAAGGGTGTTTGGCTTCCCC |
| | | GTCCACTACACAGACGTCTCCAACATGAGCCGCTTGGCGAGGCAGAGAC |
| | | TGCTGGGCCGATCGTGGAGCGTGCCGGTCATCCGCCACCTCTTCGCTCCG |
| | | CTGAAGGAATATTTTGCTTGTGTGTCTAGCGGCAATAGTAACGCTAACAG |
| | | CCGCGGGCCGAGCTTCAGCAGCGGCCTGGTGCCGTTAAGCTTGCGCGGC |
| | | AGCCATATGGGCCCTATGGAGATATACAAGACAGTGTCTGCATGGAAGA |
| | | GACAGCCAGTGCGGGTACTGAGCCTCTTCAGAAACATCGACAAGGTACT |
| | | AAAGAGTTTGGGCTTCTTGGAAAGCGGTTCTGGTTCTGGGGGAGGAACG |
| | | CTGAAGTACGTGGAAGATGTCACAAATGTCGTGAGGAGAGACGTGGAG |
| | | AAATGGGGCCCCTTTGACCTGGTGTACGGCTCGACGCAGCCCCTAGGCA |
| | | GCTCTTGTGATCGCTGTCCCGGCTGGTACATGTTCCAGTTCCACCGGATCC |
| | | TGCAGTATGCGCTGCCTCGCCAGGAGAGTCAGCGGCCCTTCTTCTGGATA |
| | | TTCATGGACAATCTGCTGCTGACTGAGGATGACCAAGAGACAACTACCCG |
| | | CTTCCTTCAGACAGAGGCTGTGACCCTCCAGGATGTCCGTGGCAGAGACT |
| | | ACCAGAATGCTATGCGGGTGTGGAGCAACATTCCAGGGCTGAAGAGCAA |
| | | GCATGCGCCCCTGACCCCAAAGGAAGAAGAGTATCTGCAAGCCCAAGTC |
| | | AGAAGCAGGAGCAAGCTGGACGCCCCGAAAGTTGACCTCCTGGTGAAG |
| | | AACTGCCTTCTCCCGCTGAGAGAGTACTTCAAGTATTTTTCTCAAAACTCA |
| | | CTTCCTCTTGGAGGGCCGAGCTCTGGCGCACCCCCACCAAGTGGAGGGT |
| | | CTCCTGCCGGGTCCCCAACATCTACTGAAGAAGGCACCAGCGAATCCGCA |
| | | ACGCCCGAGTCAGGCCCTGGTACCTCCACAGAACCATCTGAAGGTAGTG |
| | | CGCCTGGTTCCCCAGCTGGAAGCCCTACTTCCACCGAAGAAGGCACGTCA |
| | | ACCGAACCAAGTGAAGGATCTGCCCCTGGGACCAGCACTGAACCATCTG |
| | | AGCCAAAAAAGAAGAGAAAGGTATACATGGACAAGAAGTACAGCATCG |
| | | GCCTGGCCATCGGCACCAACTCTGTGGGCTGGGCCGTGATCACCGACGA |
| | | GTACAAGGTGCCCAGCAAGAAATTCAAGGTGCTGGGCAACACCGACCGG |
| | | CACAGCATCAAGAAGAACCTGATCGGCGCCCTGCTGTTCGACAGCGGAG |
| | | AAACAGCCGAGGCCACCCGGCTGAAGAGAACCGCCAGAAGAAGATACA |
| | | CCAGACGGAAGAACCGGATCTGCTATCTGCAAGAGATCTTCAGCAACGA |
| | | GATGGCCAAGGTGGACGACAGCTTCTTCCACAGACTGGAAGAGTCCTTC |
| | | CTGGTGGAAGAGGATAAGAAGCACGAGCGGCACCCCATCTTCGGCAACA |
| | | TCGTGGACGAGGTGGCCTACCACGAGAAGTACCCCACCATCTACCACCTG |
| | | AGAAAGAAACTGGTGGACAGCACCGACAAGGCCGACCTGCGGCTGATCT |
| | | ATCTGGCCCTGGCCCACATGATCAAGTTCCGGGGCCACTTCCTGATCGAG |
| | | GGCGACCTGAACCCCGACAACAGCGACGTGGACAAGCTGTTCATCCAGC |
| | | TGGTGCAGACCTACAACCAGCTGTTCGAGGAAAACCCCATCAACGCCAG |
| | | CGGCGTGGACGCCAAGGCCATCCTGTCTGCCAGACTGAGCAAGAGCAGA |
| | | CGGCTGGAAAATCTGATCGCCCAGCTGCCCGGCGAGAAGAAGAATGGCC |
| | | TGTTCGGCAACCTGATTGCCCTGAGCCTGGGCCTGACCCCCAACTTCAAG |
| | | AGCAACTTCGACCTGGCCGAGGATGCCAAACTGCAGCTGAGCAAGGACA |
| | | CCTACGACGACGACCTGGACAACCTGCTGGCCCAGATCGGCGACCAGTA |
| | | CGCCGACCTGTTTCTGGCCGCCAAGAACCTGTCCGACGCCATCCTGCTGA |
| | | GCGACATCCTGAGAGTGAACACCGAGATCACCAAGGCCCCCCTGAGCGC |
| | | CTCTATGATCAAGAGATACGACGAGCACCACCAGGACCTGACCCTGCTGA |
| | | AAGCTCTCGTGCGGCAGCAGCTGCCTGAGAAGTACAAAGAGATTTTCTTC |
| | | GACCAGAGCAAGAACGGCTACGCCGGCTACATCGATGGCGGAGCCAGC |
| | | CAGGAAGAGTTCTACAAGTTCATCAAGCCCATCCTGGAAAAGATGGACG |
| | | GCACCGAGGAACTGCTCGTGAAGCTGAACAGAGAGGACCTGCTGCGGA |
| | | AGCAGCGGACCTTCGACAACGGCAGCATCCCCCACCAGATCCACCTGGG |
| | | AGAGCTGCACGCCATTCTGCGGCGGCAGGAAGATTTTTACCCATTCCTGA |
| | | AGGACAACCGGGAAAAGATCGAGAAGATCCTGACCTTCCGCATCCCCTA |
| | | CTACGTGGGCCCTCTGGCCAGGGGAAACAGCAGATTCGCCTGGATGACC |
| | | AGAAAGAGCGAGGAAACCATCACCCCCTGGAACTTCGAGGAAGTGGTG |
| | | GACAAGGGCGCCAGCGCCCAGAGCTTCATCGAGCGGATGACCAACTTCG |
| | | ATAAGAACCTGCCCAACGAGAAGGTGCTGCCCAAGCACAGCCTGCTGTA |
| | | CGAGTACTTCACCGTGTACAACGAGCTGACCAAAGTGAAATACGTGACC |
| | | GAGGGAATGAGAAAGCCCGCCTTCCTGAGCGGCGAGCAGAAAAAAGCC |
| | | ATCGTGGACCTGCTGTTCAAGACCAACCGGAAAGTGACCGTGAAGCAGC |
| | | TGAAAGAGGACTACTTCAAGAAAATCGAGTGCTTCGACTCCGTGGAAAT |
| | | CTCCGGCGTGGAAGATCGGTTCAACGCCTCCCTGGGCACATACCACGATC |
| | | TGCTGAAAATTATCAAGGACAAGGACTTCCTGGACAATGAGGAAAACGA |
| | | GGACATTCTGGAAGATATCGTGCTGACCCTGACACTGTTTGAGGACAGA |
| | | GAGATGATCGAGGAACGGCTGAAAACCTATGCCCACCTGTTCGACGACA |
| | | AAGTGATGAAGCAGCTGAAGCGGCGGAGATACACCGGCTGGGGCAGGC |
| | | TGAGCCGGAAGCTGATCAACGGCATCCGGGACAAGCAGTCCGGCAAGA |
| | | CAATCCTGGATTTCCTGAAGTCCGACGGCTTCGCCAACAGAAACTTCATG |
| | | CAGCTGATCCACGACGACAGCCTGACCTTTAAAGAGGACATCCAGAAAG |
| | | CCCAGGTGTCCGGCCAGGGCGATAGCCTGCACGAGCACATTGCCAATCT |
| | | GGCCGGCAGCCCCGCCATTAAGAAGGGCATCCTGCAGACAGTGAAGGTG |
| | | GTGGACGAGCTCGTGAAAGTGATGGGCCGGCACAAGCCCGAGAACATC |
| | | GTGATCGAAATGGCCAGAGAGAACCAGACCACCCAGAAGGGACAGAAG |
| | | AACAGCCGCGAGAGAATGAAGCGGATCGAAGAGGGCATCAAAGAGCTG |
| | | GGCAGCCAGATCCTGAAAGAACACCCCGTGGAAAACACCCAGCTGCAGA |
| | | ACGAGAAGCTGTACCTGTACTACCTGCAGAATGGGCGGGATATGTACGT |
| | | GGACCAGGAACTGGACATCAACCGGCTGTCCGACTACGATGTGGACGCT |
| | | ATCGTGCCTCAGAGCTTTCTGAAGGACGACTCCATCGATAACAAAGTGCT |
| | | GACTCGGAGCGACAAGAACCGGGGCAAGAGCGACAACGTGCCCTCCGA |
| | | AGAGGTCGTGAAGAAGATGAAGAACTACTGGCGCCAGCTGCTGAATGCC |
| | | AAGCTGATTACCCAGAGGAAGTTCGACAATCTGACCAAGGCCGAGAGAG |
| | | GCGGCCTGAGCGAACTGGATAAGGCCGGCTTCATCAAGAGACAGCTGGT |
| | | GGAAACCCGGCAGATCACAAAGCACGTGGCACAGATCCTGGACTCCCGG |
| | | ATGAACACTAAGTACGACGAGAACGACAAACTGATCCGGGAAGTGAAA |
| | | GTGATCACCCTGAAGTCCAAGCTGGTGTCCGATTTCCGGAAGGATTTCCA |
| | | GTTTTACAAAGTGCGCGAGATCAACAACTACCACCACGCCCACGACGCCT |
| | | ACCTGAACGCCGTCGTGGGAACCGCCCTGATCAAAAAGTACCCTAAGCT |
| | | GGAAAGCGAGTTCGTGTACGGCGACTACAAGGTGTACGACGTGCGGAA |
| | | GATGATCGCCAAGAGCGAGCAGGAAATCGGCAAGGCTACCGCCAAGTA |
| | | CTTCTTCTACAGCAACATCATGAACTTTTTCAAGACCGAGATTACCCTGGC |
| | | CAACGGCGAGATCCGGAAGCGGCCTCTGATCGAGACAAACGGCGAAAC |
| | | AGGCGAGATCGTGTGGGATAAGGGCCGGGACTTTGCCACCGTGCGGAA |
| | | AGTGCTGTCTATGCCCCAAGTGAATATCGTGAAAAAGACCGAGGTGCAG |
| | | ACAGGCGGCTTCAGCAAAGAGTCTATCCTGCCCAAGAGGAACAGCGACA |
| | | AGCTGATCGCCAGAAAGAAGGACTGGGACCCTAAGAAGTACGGCGGCTT |
| | | CGACAGCCCCACCGTGGCCTATTCTGTGCTGGTGGTGGCCAAAGTGGAA |
| | | AAGGGCAAGTCCAAGAAACTGAAGAGTGTGAAAGAGCTGCTGGGGATC |
| | | ACCATCATGGAAAGAAGCAGCTTCGAGAAGAATCCCATCGACTTTCTGGA |
| | | AGCCAAGGGCTACAAAGAAGTGAAAAAGGACCTGATCATCAAGCTGCCT |
| | | AAGTACTCCCTGTTCGAGCTGGAAAACGGCCGGAAGAGAATGCTGGCCT |
| | | CTGCCGGCGAACTGCAGAAGGGAAACGAACTGGCCCTGCCCTCCAAATA |
| | | TGTGAACTTCCTGTACCTGGCCAGCCACTATGAGAAGCTGAAGGGCTCCC |
| | | CCGAGGATAATGAGCAGAAACAGCTGTTTGTGGAACAGCACAAACACTA |
| | | CCTGGACGAGATCATCGAGCAGATCAGCGAGTTCTCCAAGAGAGTGATC |
| | | CTGGCCGACGCTAATCTGGACAAGGTGCTGAGCGCCTACAACAAGCACA |
| | | GAGACAAGCCTATCAGAGAGCAGGCCGAGAATATCATCCACCTGTTTACC |
| | | CTGACCAATCTGGGAGCCCCTGCCGCCTTCAAGTACTTTGACACCACCAT |
| | | CGACCGGAAGAGGTACACCAGCACCAAAGAGGTGCTGGACGCCACCCTG |
| | | ATCCACCAGAGCATCACCGGCCTGTACGAGACACGGATCGACCTGTCTCA |
| | | GCTGGGAGGCGACCCAAAAAAGAAGAGAAAGGTAAGCGGAAGTGAGA |
| | | CCCCAGGTACATCCGAATCAGCAACGCCTGAAAGCACCGGTCGGACACT |
| | | GGTGACCTTCAAGGATGTATTTGTGGACTTCACCAGGGAGGAGTGGAAG |
| | | CTGCTGGACACTGCTCAGCAGATCGTGTACAGAAATGTGATGCTGGAGA |
| | | ACTATAAGAACCTGGTTTCCTTGGGTTATCAGCTTACTAAGCCAGATGTG |
| | | ATCCTCCGGTTGGAGAAGGGAGAAGAGCCCTGA |
| 1766 | Fusion Protein | MGTMPKKKRKVPKKKRKVYNHDQEFDPPKVYPPVPAEKRKPIRVLSLFDGIA |
| | 15 Amino Acid | TGLLVLKDLGIQVDRYIASEVCEDSITVGMVRHQGKIMYVGDVRSVTQKHIQ |
| | Sequence | EWGPFDLVIGGSPCNDLSIVNPARKGLYEGTGRLFFEFYRLLHDARPKEGDD |
| | NLS-NLS-3A-3L- | RPFFWLFENVVAMGVSDKRDISRFLESNPVMIDAKEVSAAHRARYFWGNLP |
| | dCas9-ZIM3-NLS- | GMNRPLASTVNDKLELQECLEHGRIAKFSKVRTITTRSNSIKQGKDQHFPVF |
| | NLS | MNEKEDILWCTEMERVFGFPVHYTDVSNMSRLARQRLLGRSWSVPVIRHLF |
| | | APLKEYFACVSSGNSNANSRGPSFSSGLVPLSLRGSHMGPMEIYKTVSAWKR |
| | | QPVRVLSLFRNIDKVLKSLGFLESGSGSGGGTLKYVEDVTNVVRRDVEKWGP |
| | | FDLVYGSTQPLGSSCDRCPGWYMFQFHRILQYALPRQESQRPFFWIFMDNL |
| | | LLTEDDQETTTRFLQTEAVTLQDVRGRDYQNAMRVWSNIPGLKSKHAPLTP |
| | | KEEEYLQAQVRSRSKLDAPKVDLLVKNCLLPLREYFKYFSQNSLPLGGPSSGA |
| | | PPPSGGSPAGSPTSTEEGTSESATPESGPGTSTEPSEGSAPGSPAGSPTSTEE |
| | | GTSTEPSEGSAPGTSTEPSEMDKKYSIGLAIGTNSVGWAVITDEYKVPSKKFK |
| | | VLGNTDRHSIKKNLIGALLFDSGETAEATRLKRTARRRYTRRKNRICYLQEIFS |
| | | NEMAKVDDSFFHRLEESFLVEEDKKHERHPIFGNIVDEVAYHEKYPTIYHLRK |
| | | KLVDSTDKADLRLIYLALAHMIKFRGHFLIEGDLNPDNSDVDKLFIQLVQTYN |
| | | QLFEENPINASGVDAKAILSARLSKSRRLENLIAQLPGEKKNGLFGNLIALSLGL |
| | | TPNFKSNFDLAEDAKLQLSKDTYDDDLDNLLAQIGDQYADLFLAAKNLSDAIL |
| | | LSDILRVNTEITKAPLSASMIKRYDEHHQDLTLLKALVRQQLPEKYKEIFFDQS |
| | | KNGYAGYIDGGASQEEFYKFIKPILEKMDGTEELLVKLNREDLLRKQRTFDNG |
| | | SIPHQIHLGELHAILRRQEDFYPFLKDNREKIEKILTFRIPYYVGPLARGNSRFA |
| | | WMTRKSEETITPWNFEEVVDKGASAQSFIERMTNFDKNLPNEKVLPKHSLL |
| | | YEYFTVYNELTKVKYVTEGMRKPAFLSGEQKKAIVDLLFKTNRKVTVKQLKED |
| | | YFKKIECFDSVEISGVEDRFNASLGTYHDLLKIIKDKDFLDNEENEDILEDIVLT |
| | | LTLFEDREMIEERLKTYAHLFDDKVMKQLKRRRYTGWGRLSRKLINGIRDKQS |
| | | GKTILDFLKSDGFANRNFMQLIHDDSLTFKEDIQKAQVSGQGDSLHEHIANL |
| | | AGSPAIKKGILQTVKVVDELVKVMGRHKPENIVIEMARENQTTQKGQKNSR |
| | | ERMKRIEEGIKELGSQILKEHPVENTQLQNEKLYLYYLQNGRDMYVDQELDI |
| | | NRLSDYDVDAIVPQSFLKDDSIDNKVLTRSDKNRGKSDNVPSEEVVKKMKNY |
| | | WRQLLNAKLITQRKFDNLTKAERGGLSELDKAGFIKRQLVETRQITKHVAQIL |
| | | DSRMNTKYDENDKLIREVKVITLKSKLVSDFRKDFQFYKVREINNYHHAHDA |
| | | YLNAVVGTALIKKYPKLESEFVYGDYKVYDVRKMIAKSEQEIGKATAKYFFYSN |
| | | IMNFFKTEITLANGEIRKRPLIETNGETGEIVWDKGRDFATVRKVLSMPQVNI |
| | | VKKTEVQTGGFSKESILPKRNSDKLIARKKDWDPKKYGGFDSPTVAYSVLVVA |
| | | KVEKGKSKKLKSVKELLGITIMERSSFEKNPIDFLEAKGYKEVKKDLIIKLPKYS |
| | | LFELENGRKRMLASAGELQKGNELALPSKYVNFLYLASHYEKLKGSPEDNEQKQ |
| | | LFVEQHKHYLDEIIEQISEFSKRVILADANLDKVLSAYNKHRDKPIREQAENIIH |
| | | LFTLTNLGAPAAFKYFDTTIDRKRYTSTKEVLDATLIHQSITGLYETRIDLSQLG |
| | | GDSGSETPGTSESATPESTGMNNSQGRVTFEDVTVNFTQGEWQRLNPEQR |
| | | NLYRDVMLENYSNLVSVGQGETTKPDVILRLEQGKEPWLEEEEVLGSGRAEK |
| | | NGDIGGQIWKPKDVKESLSADYKDDDDKAPKKKRKVPKKKRKV |
| 1767 | Fusion Protein | ATGGGTACCATGCCAAAAAAGAAGAGAAAGGTACCGAAGAAAAAAAGA |
| | 15 DNA Sequence | AAGGTATACAACCATGACCAGGAATTCGACCCCCCAAAGGTTTACCCACC |
| | | TGTGCCAGCTGAGAAGAGGAAGCCCATCCGCGTGCTGTCTCTCTTTGATG |
| | | GGATTGCTACAGGGCTCCTGGTGCTGAAGGACCTGGGCATCCAAGTGGA |
| | | CCGCTACATTGCCTCCGAGGTGTGTGAGGACTCCATCACGGTGGGCATG |
| | | GTGCGGCACCAGGGAAAGATCATGTACGTCGGGGACGTCCGCAGCGTCA |
| | | CACAGAAGCATATCCAGGAGTGGGGCCCATTCGACCTGGTGATTGGAGG |
| | | CAGTCCCTGCAATGACCTCTCCATTGTCAACCCTGCCCGCAAGGGACTTTA |
| | | TGAGGGTACTGGCCGCCTCTTCTTTGAGTTCTACCGCCTCCTGCATGATGC |
| | | GCGGCCCAAGGAGGGAGATGATCGCCCCTTCTTCTGGCTCTTTGAGAAT |
| | | GTGGTGGCCATGGGCGTTAGTGACAAGAGGGACATCTCGCGATTTCTTG |
| | | AGTCTAACCCCGTGATGATTGACGCCAAAGAAGTGTCTGCTGCACACAG |
| | | GGCCCGTTACTTCTGGGGTAACCTTCCTGGCATGAACAGGCCTTTGGCAT |
| | | CCACTGTGAATGATAAGCTGGAGCTGCAAGAGTGTCTGGAGCACGGCAG |
| | | AATAGCCAAGTTCAGCAAAGTGAGGACCATTACCACCAGGTCAAACTCTA |
| | | TAAAGCAGGGCAAAGACCAGCATTTCCCCGTCTTCATGAACGAGAAGGA |
| | | GGACATCCTGTGGTGCACTGAAATGGAAAGGGTGTTTGGCTTCCCCGTCC |
| | | ACTACACAGACGTCTCCAACATGAGCCGCTTGGCGAGGCAGAGACTGCT |
| | | GGGCCGATCGTGGAGCGTGCCGGTCATCCGCCACCTCTTCGCTCCGCTGA |
| | | AGGAATATTTTGCTTGTGTGTCTAGCGGCAATAGTAACGCTAACAGCCGC |
| | | GGGCCGAGCTTCAGCAGCGGCCTGGTGCCGTTAAGCTTGCGCGGCAGCC |
| | | ATATGGGCCCTATGGAGATATACAAGACAGTGTCTGCATGGAAGAGACA |
| | | GCCAGTGCGGGTACTGAGCCTCTTCAGAAACATCGACAAGGTACTAAAG |
| | | AGTTTGGGCTTCTTGGAAAGCGGTTCTGGTTCTGGGGGAGGAACGCTGA |
| | | AGTACGTGGAAGATGTCACAAATGTCGTGAGGAGAGACGTGGAGAAAT |
| | | GGGGCCCCTTTGACCTGGTGTACGGCTCGACGCAGCCCCTAGGCAGCTCT |
| | | TGTGATCGCTGTCCCGGCTGGTACATGTTCCAGTTCCACCGGATCCTGCA |
| | | GTATGCGCTGCCTCGCCAGGAGAGTCAGCGGCCCTTCTTCTGGATATTCA |
| | | TGGACAATCTGCTGCTGACTGAGGATGACCAAGAGACAACTACCCGCTTC |
| | | CTTCAGACAGAGGCTGTGACCCTCCAGGATGTCCGTGGCAGAGACTACC |
| | | AGAATGCTATGCGGGTGTGGAGCAACATTCCAGGGCTGAAGAGCAAGC |
| | | ATGCGCCCCTGACCCCAAAGGAAGAAGAGTATCTGCAAGCCCAAGTCAG |
| | | AAGCAGGAGCAAGCTGGACGCCCCGAAAGTTGACCTCCTGGTGAAGAAC |
| | | TGCCTTCTCCCGCTGAGAGAGTACTTCAAGTATTTTTCTCAAAACTCACTT |
| | | CCTCTTGGAGGGCCGAGCTCTGGCGCACCCCCACCAAGTGGAGGGTCTC |
| | | CTGCCGGGTCCCCAACATCTACTGAAGAAGGCACCAGCGAATCCGCAAC |
| | | GCCCGAGTCAGGCCCTGGTACCTCCACAGAACCATCTGAAGGTAGTGCG |
| | | CCTGGTTCCCCAGCTGGAAGCCCTACTTCCACCGAAGAAGGCACGTCAAC |
| | | CGAACCAAGTGAAGGATCTGCCCCTGGGACCAGCACTGAACCATCTGAG |
| | | ATGGACAAGAAGTACAGCATCGGCCTGGCCATCGGCACCAACTCTGTGG |
| | | GCTGGGCCGTGATCACCGACGAGTACAAGGTGCCCAGCAAGAAATTCAA |
| | | GGTGCTGGGCAACACCGACCGGCACAGCATCAAGAAGAACCTGATCGGC |
| | | GCCCTGCTGTTCGACAGCGGAGAAACAGCCGAGGCCACCCGGCTGAAGA |
| | | GAACCGCCAGAAGAAGATACACCAGACGGAAGAACCGGATCTGCTATCT |
| | | GCAAGAGATCTTCAGCAACGAGATGGCCAAGGTGGACGACAGCTTCTTC |
| | | CACAGACTGGAAGAGTCCTTCCTGGTGGAAGAGGATAAGAAGCACGAG |
| | | CGGCACCCCATCTTCGGCAACATCGTGGACGAGGTGGCCTACCACGAGA |
| | | AGTACCCCACCATCTACCACCTGAGAAAGAAACTGGTGGACAGCACCGA |
| | | CAAGGCCGACCTGCGGCTGATCTATCTGGCCCTGGCCCACATGATCAAGT |
| | | TCCGGGGCCACTTCCTGATCGAGGGCGACCTGAACCCCGACAACAGCGA |
| | | CGTGGACAAGCTGTTCATCCAGCTGGTGCAGACCTACAACCAGCTGTTCG |
| | | AGGAAAACCCCATCAACGCCAGCGGCGTGGACGCCAAGGCCATCCTGTC |
| | | TGCCAGACTGAGCAAGAGCAGACGGCTGGAAAATCTGATCGCCCAGCTG |
| | | CCCGGCGAGAAGAAGAATGGCCTGTTCGGCAACCTGATTGCCCTGAGCC |
| | | TGGGCCTGACCCCCAACTTCAAGAGCAACTTCGACCTGGCCGAGGATGCC |
| | | AAACTGCAGCTGAGCAAGGACACCTACGACGACGACCTGGACAACCTGC |
| | | TGGCCCAGATCGGCGACCAGTACGCCGACCTGTTTCTGGCCGCCAAGAA |
| | | CCTGTCCGACGCCATCCTGCTGAGCGACATCCTGAGAGTGAACACCGAG |
| | | ATCACCAAGGCCCCCCTGAGCGCCTCTATGATCAAGAGATACGACGAGC |
| | | ACCACCAGGACCTGACCCTGCTGAAAGCTCTCGTGCGGCAGCAGCTGCCT |
| | | GAGAAGTACAAAGAGATTTTCTTCGACCAGAGCAAGAACGGCTACGCCG |
| | | GCTACATCGATGGCGGAGCCAGCCAGGAAGAGTTCTACAAGTTCATCAA |
| | | GCCCATCCTGGAAAAGATGGACGGCACCGAGGAACTGCTCGTGAAGCTG |
| | | AACAGAGAGGACCTGCTGCGGAAGCAGCGGACCTTCGACAACGGCAGC |
| | | ATCCCCCACCAGATCCACCTGGGAGAGCTGCACGCCATTCTGCGGCGGCA |
| | | GGAAGATTTTTACCCATTCCTGAAGGACAACCGGGAAAAGATCGAGAAG |
| | | ATCCTGACCTTCCGCATCCCCTACTACGTGGGCCCTCTGGCCAGGGGAAA |
| | | CAGCAGATTCGCCTGGATGACCAGAAAGAGCGAGGAAACCATCACCCCC |
| | | TGGAACTTCGAGGAAGTGGTGGACAAGGGCGCCAGCGCCCAGAGCTTC |
| | | ATCGAGCGGATGACCAACTTCGATAAGAACCTGCCCAACGAGAAGGTGC |
| | | TGCCCAAGCACAGCCTGCTGTACGAGTACTTCACCGTGTACAACGAGCTG |
| | | ACCAAAGTGAAATACGTGACCGAGGGAATGAGAAAGCCCGCCTTCCTGA |
| | | GCGGCGAGCAGAAAAAAGCCATCGTGGACCTGCTGTTCAAGACCAACCG |
| | | GAAAGTGACCGTGAAGCAGCTGAAAGAGGACTACTTCAAGAAAATCGA |
| | | GTGCTTCGACTCCGTGGAAATCTCCGGCGTGGAAGATCGGTTCAACGCCT |
| | | CCCTGGGCACATACCACGATCTGCTGAAAATTATCAAGGACAAGGACTTC |
| | | CTGGACAATGAGGAAAACGAGGACATTCTGGAAGATATCGTGCTGACCC |
| | | TGACACTGTTTGAGGACAGAGAGATGATCGAGGAACGGCTGAAAACCTA |
| | | TGCCCACCTGTTCGACGACAAAGTGATGAAGCAGCTGAAGCGGCGGAGA |
| | | TACACCGGCTGGGGCAGGCTGAGCCGGAAGCTGATCAACGGCATCCGG |
| | | GACAAGCAGTCCGGCAAGACAATCCTGGATTTCCTGAAGTCCGACGGCTT |
| | | CGCCAACAGAAACTTCATGCAGCTGATCCACGACGACAGCCTGACCTTTA |
| | | AAGAGGACATCCAGAAAGCCCAGGTGTCCGGCCAGGGCGATAGCCTGC |
| | | ACGAGCACATTGCCAATCTGGCCGGCAGCCCCGCCATTAAGAAGGGCAT |
| | | CCTGCAGACAGTGAAGGTGGTGGACGAGCTCGTGAAAGTGATGGGCCG |
| | | GCACAAGCCCGAGAACATCGTGATCGAAATGGCCAGAGAGAACCAGACC |
| | | ACCCAGAAGGGACAGAAGAACAGCCGCGAGAGAATGAAGCGGATCGAA |
| | | GAGGGCATCAAAGAGCTGGGCAGCCAGATCCTGAAAGAACACCCCGTG |
| | | GAAAACACCCAGCTGCAGAACGAGAAGCTGTACCTGTACTACCTGCAGA |
| | | ATGGGCGGGATATGTACGTGGACCAGGAACTGGACATCAACCGGCTGTC |
| | | CGACTACGATGTGGACGCTATCGTGCCTCAGAGCTTTCTGAAGGACGACT |
| | | CCATCGATAACAAAGTGCTGACTCGGAGCGACAAGAACCGGGGCAAGA |
| | | GCGACAACGTGCCCTCCGAAGAGGTCGTGAAGAAGATGAAGAACTACTG |
| | | GCGCCAGCTGCTGAATGCCAAGCTGATTACCCAGAGGAAGTTCGACAAT |
| | | CTGACCAAGGCCGAGAGAGGCGGCCTGAGCGAACTGGATAAGGCCGGC |
| | | TTCATCAAGAGACAGCTGGTGGAAACCCGGCAGATCACAAAGCACGTGG |
| | | CACAGATCCTGGACTCCCGGATGAACACTAAGTACGACGAGAACGACAA |
| | | ACTGATCCGGGAAGTGAAAGTGATCACCCTGAAGTCCAAGCTGGTGTCC |
| | | GATTTCCGGAAGGATTTCCAGTTTTACAAAGTGCGCGAGATCAACAACTA |
| | | CCACCACGCCCACGACGCCTACCTGAACGCCGTCGTGGGAACCGCCCTGA |
| | | TCAAAAAGTACCCTAAGCTGGAAAGCGAGTTCGTGTACGGCGACTACAA |
| | | GGTGTACGACGTGCGGAAGATGATCGCCAAGAGCGAGCAGGAAATCGG |
| | | CAAGGCTACCGCCAAGTACTTCTTCTACAGCAACATCATGAACTTTTTCAA |
| | | GACCGAGATTACCCTGGCCAACGGCGAGATCCGGAAGCGGCCTCTGATC |
| | | GAGACAAACGGCGAAACAGGCGAGATCGTGTGGGATAAGGGCCGGGAC |
| | | TTTGCCACCGTGCGGAAAGTGCTGTCTATGCCCCAAGTGAATATCGTGAA |
| | | AAAGACCGAGGTGCAGACAGGCGGCTTCAGCAAAGAGTCTATCCTGCCC |
| | | AAGAGGAACAGCGACAAGCTGATCGCCAGAAAGAAGGACTGGGACCCT |
| | | AAGAAGTACGGCGGCTTCGACAGCCCCACCGTGGCCTATTCTGTGCTGGT |
| | | GGTGGCCAAAGTGGAAAAGGGCAAGTCCAAGAAACTGAAGAGTGTGAA |
| | | AGAGCTGCTGGGGATCACCATCATGGAAAGAAGCAGCTTCGAGAAGAAT |
| | | CCCATCGACTTTCTGGAAGCCAAGGGCTACAAAGAAGTGAAAAAGGACC |
| | | TGATCATCAAGCTGCCTAAGTACTCCCTGTTCGAGCTGGAAAACGGCCGG |
| | | AAGAGAATGCTGGCCTCTGCCGGCGAACTGCAGAAGGGAAACGAACTG |
| | | GCCCTGCCCTCCAAATATGTGAACTTCCTGTACCTGGCCAGCCACTATGA |
| | | GAAGCTGAAGGGCTCCCCCGAGGATAATGAGCAGAAACAGCTGTTTGTG |
| | | GAACAGCACAAACACTACCTGGACGAGATCATCGAGCAGATCAGCGAGT |
| | | TCTCCAAGAGAGTGATCCTGGCCGACGCTAATCTGGACAAGGTGCTGAG |
| | | CGCCTACAACAAGCACAGAGACAAGCCTATCAGAGAGCAGGCCGAGAAT |
| | | ATCATCCACCTGTTTACCCTGACCAATCTGGGAGCCCCTGCCGCCTTCAAG |
| | | TACTTTGACACCACCATCGACCGGAAGAGGTACACCAGCACCAAAGAGG |
| | | TGCTGGACGCCACCCTGATCCACCAGAGCATCACCGGCCTGTACGAGACA |
| | | CGGATCGACCTGTCTCAGCTGGGAGGCGACAGCGGAAGTGAGACCCCA |
| | | GGTACATCCGAATCAGCAACGCCTGAAAGCACCGGTATGAACAATTCAC |
| | | AGGGGAGAGTGACATTCGAAGACGTGACCGTGAACTTCACCCAGGGAG |
| | | AATGGCAGCGCTTGAACCCAGAACAAAGGAACCTCTATCGGGACGTGAT |
| | | GCTGGAAAACTACTCAAATTTGGTGAGCGTTGGGCAGGGTGAGACCACT |
| | | AAGCCTGACGTGATCCTGAGATTGGAACAGGGCAAGGAGCCTTGGCTCG |
| | | AGGAAGAGGAAGTCCTGGGCTCAGGGAGGGCCGAGAAAAACGGTGATA |
| | | TAGGAGGCCAGATATGGAAGCCTAAGGACGTCAAGGAGAGCCTGAGCG |
| | | CTGATTACAAAGATGATGACGATAAAGCCCCAAAAAAGAAGAGAAAGGT |
| | | ACCGAAGAAAAAAAGAAAGGTCTGA |

The application's sequence listing, which the Patent Office published only in electronic form, follows.

SEQUENCE LISTING (1767 sequences)

SEQ ID NO: 1 - DNA, 4107 bp, Streptococcus pyogenes
  source 1..4107: mol_type = genomic DNA
atggataagaaatactcaataggcttagatatcggcacaaatagcgtcggatgggcggtgatcactgatgaatataaggttccgtctaaaaagttcaaggttctgggaaatacagaccgccacagtatcaaaaaaaatcttataggggctcttttatttgacagtggagagacagcggaagcgactcgtctcaaacggacagctcgtagaaggtatacacgtcggaagaatcgtatttgttatctacaggagattttttcaaatgagatggcgaaagtagatgatagtttctttcatcgacttgaagagtcttttttggtggaagaagacaagaagcatgaacgtcatcctatttttggaaatatagtagatgaagttgcttatcatgagaaatatccaactatctatcatctgcgaaaaaaattggtagattctactgataaagcggatttgcgcttaatctatttggccttagcgcatatgattaagtttcgtggtcattttttgattgagggagatttaaatcctgataatagtgatgtggacaaactatttatccagttggtacaaacctacaatcaattatttgaagaaaaccctattaacgcaagtggagtagatgctaaagcgattctttctgcacgattgagtaaatcaagacgattagaaaatctcattgctcagctccccggtgagaagaaaaatggcttatttgggaatctcattgctttgtcattgggtttgacccctaattttaaatcaaattttgatttggcagaagatgctaaattacagctttcaaaagatacttacgatgatgatttagataatttattggcgcaaattggagatcaatatgctgatttgtttttggcagctaagaatttatcagatgctattttactttcagatatcctaagagtaaatactgaaataactaaggctcccctatcagcttcaatgattaaacgctacgatgaacatcatcaagacttgactcttttaaaagctttagttcgacaacaacttccagaaaagtataaagaaatcttttttgatcaatcaaaaaacggatatgcaggttatattgatgggggagctagccaagaagaattttataaatttatcaaaccaattttagaaaaaatggatggtactgaggaattattggtgaaactaaatcgtgaagatttgctgcgcaagcaacggacctttgacaacggctctattccccatcaaattcacttgggtgagctgcatgctattttgagaagacaagaagacttttatccatttttaaaagacaatcgtgagaagattgaaaaaatcttgacttttcgaattccttattatgttggtccattggcgcgtggcaatagtcgttttgcatggatgactcggaagtctgaagaaacaattaccccatggaattttgaagaagttgtcgataaaggtgcttcagctcaatcatttattgaacgcatgacaaactttgataaaaatcttccaaatgaaaaagtactaccaaaacatagtttgctttatgagtattttacggtttataacgaattgacaaaggtcaaatatgttactgaaggaatgcgaaaaccagcatttctttcaggtgaacagaagaaagccattgttgatttactcttcaaaacaaatcgaaaagtaaccgttaagcaattaaaagaagattatttcaaaaaaatagaatgttttgatagtgttgaaatttcaggagttgaagatagatttaatgcttcattaggtacctaccatgatttgctaaaaattattaaagataaagattttttggataatgaagaaaatgaagatatcttagaggatattgttttaacattgaccttatttgaagatagggagatgattgaggaaagacttaaaacatatgctcacctctttgatgataaggtgatgaaacagcttaaacgtcgccgttatactggttggggacgtttgtctcgaaaattgattaatggtattagggataagcaatctggcaaaacaatattagattttttgaaatcagatggttttgccaatcgcaattttatgcagctgatccatgatgatagtttgacatttaaagaagacattcaaaaagcacaagtgtctggacaaggcgatagtttacatgaacatattgcaaatttagctggtagccctgctattaaaaaaggtattttacagactgtaaaagttgttgatgaattggtcaaagtaatggggcggcataagccagaaaatatcgttattgaaatggcacgtgaaaatcagacaactcaaaagggccagaaaaattcgcgagagcgtatgaaacgaatcgaagaaggtatcaaagaattaggaagtcagattcttaaagagcatcctgttgaaaatactcaattgcaaaatgaaaagctctatctctattatctccaaaatggaagagacatgtatgtggaccaagaattagatattaatcgtttaagtgattatgatgtcgatcacattgttccacaaagtttccttaaagacgattcaatagacaataaggtcttaacgcgttctgataaaaatcgtggtaaatcggataacgttccaagtgaagaagtagtcaaaaagatgaaaaactattggagacaacttctaaacgccaagttaatcactcaacgtaagtttgataatttaacgaaagctgaacgtggaggtttgagtgaacttgataaagctggttttatcaaacgccaattggttgaaactcgccaaatcactaagcatgtggcacaaattttggatagtcgcatgaatactaaatacgatgaaaatgataaacttattcgagaggttaaagtgattaccttaaaatctaaattagtttctgacttccgaaaagatttccaattctataaagtacgtgagattaacaattaccatcatgcccatgatgcgtatctaaatgccgtcgttggaactgctttgattaagaaatatccaaaacttgaatcggagtttgtctatggtgattataaagtttatgatgttcgtaaaatgattgctaagtctgagcaagaaataggcaaagcaaccgcaaaatatttcttttactctaatatcatgaacttcttcaaaacagaaattacacttgcaaatggagagattcgcaaacgccctctaatcgaaactaatggggaaactggagaaattgtctgggataaagggcgagattttgccacagtgcgcaaagtattgtccatgccccaagtcaatattgtcaagaaaacagaagtacagacaggcggattctccaaggagtcaattttaccaaaaagaaattcggacaagcttattgctcgtaaaaaagactgggatccaaaaaaatatggtggttttgatagtccaacggtagcttattcagtcctagtggttgctaaggtggaaaaagggaaatcgaagaagttaaaatccgttaaagagttactagggatcacaattatggaaagaagttcctttgaaaaaaatccgattgactttttagaagctaaaggatataaggaagttaaaaaagacttaatcattaaactacctaaatatagtctttttgagttagaaaacggtcgtaaacggatgctggctagtgccggagaattacaaaaaggaaatgagctggctctgccaagcaaatatgtgaattttttatatttagctagtcattatgaaaagttgaagggtagtccagaagataacgaacaaaaacaattgtttgtggagcagcataagcattatttagatgagattattgagcaaatcagtgaattttctaagcgtgttattttagcagatgccaatttagataaagttcttagtgcatataacaaacatagagacaaaccaatacgtgaacaagcagaaaatattattcatttatttacgttgacgaatcttggagctcccgctgcttttaaatattttgatacaacaattgatcgtaaacgatatacgtctacaaaagaagttttagatgccactcttatccatcaatccatcactggtctttatgaaacacgcattgatttgagtcagctaggaggtgactga

SEQ ID NO: 2 - protein, 1368 aa, Streptococcus pyogenes [sequence omitted]

SEQ ID NO: 3 - protein, 1053 aa, Staphylococcus aureus
MKRNYILGLDIGITSVGYGIIDYETRDVIDAGVRLFKEANVENNEGRRSKRGARRLKRRRRHRIQRVKKLLFDYNLLTDHSELSGINPYEARVKGLSQKLSEEEFSAALLHLAKRRGVHNVNEVEEDTGNELSTKEQISRNSKALEEKYVAELQLERLKKDGEVRGSINRFKTSDYVKEAKQLLKVQKAYHQLDQSFIDTYIDLLETRRTYYEGPGEGSPFGWKDIKEWYEMLMGHCTYFPEELRSVKYAYNADLYNALNDLNNLVITRDENEKLEYYEKFQIIENVFKQKKKPTLKQIAKEILVNEEDIKGYRVTSTGKPEFTNLKVYHDIKDITARKEIIENAELLDQIAKILTIYQSSEDIQEELTNLNSELTQEEIEQISNLKGYTGTHNLSLKAINLILDELWHTNDNQIAIFNRLKLVPKKVDLSQQKEIPTTLVDDFILSPVVKRSFIQSIKVINAIIKKYGLPNDIIIELAREKNSKDAQKMINEMQKRNRQTNERIEEIIRTTGKENAKYLIEKIKLHDMQEGKCLYSLEAIPLEDLLNNPFNYEVDHIIPRSVSFDNSFNNKVLVKQEENSKKGNRTPFQYLSSSDSKISYETFKKHILNLAKGKGRISKTKKEYLLEERDINRFSVQKDFINRNLVDTRYATRGLMNLLRSYFRVNNLDVKVKSINGGFTSFLRRKWKFKKERNKGYKHHAEDALIIANADFIFKEWKKLDKAKKVMENQMFEEKQAESMPEIETEQEYKEIFITPHQIKHIKDFKDYKYSHRVDKKPNRELINDTLYSTRKDDKGNTLIVNNLNGLYDKDNDKLKKLINKSPEKLLMYHHDPQTYQKLKLIMEQYGDEKNPLYKYYEETGNYLTKYSKKDNGPVIKKIKYYGNKLNAHLDITDDYPNSRNKVVKLSLKPYRFDVYLDNGVYKFVTVKNLDVIKKENYYEVNSKCYEEAKKLKKISNQAEFIASFYNNDLIKINGELYRVIGVNNDLLNRIEVNMIDITYREYLENMNDKRPPRIIKTIASKTQSIKKYSTDILGNLYEVKSKKHPQIIKKG

SEQ ID NO: 4 - protein, 1300 aa, Francisella tularensis
MSIYQEFVNKYSLSKTLRFELIPQGKTLENIKARGLILDDEKRAKDYKKAKQIIDKYHQFFIEEILSSVCISEDLLQNYSDVYFKLKKSDDDNLQKDFKSAKDTIKKQISEYIKDSEKFKNLFNQNLIDAKKGQESDLILWLKQSKDNGIELFKANSDITDIDEALEIIKSFKGWTTYFKGFHENRKNVYSSNDIPTSIIYRIVDDNLPKFLENKAKYESLKDKAPEAINYEQIKKDLAEELTFDIDYKTSEVNQRVFSLDEVFEIANFNNYLNQSGITKFNTIIGGKFVNGENTKRKGINEYINLYSQQINDKTLKKYKMSVLFKQILSDTESKSFVIDKLEDDSDVVTTMQSFYEQIAAFKTVEEKSIKETLSLLFDDLKAQKLDLSKIYFKNDKSLTDLSQQVFDDYSVIGTAVLEYITQQIAPKNLDNPSKKEQELIAKKTEKAKYLSLETIKLALEEFNKHRDIDKQCRFEEILANFAAIPMIFDEIAQNKDNLAQISIKYQNQGKKDLLQASAEDDVKAIKDLLDQTNNLLHKLKIFHISQSEDKANILDKDEHFYLVFEECYFELANIVPLYNKIRNYITQKPYSDEKFKLNFENSTLANGWDKNKEPDNTAILFIKDDKYYLGVMNKKNNKIFDDKAIKENKGEGYKKIVYKLLPGANKMLPKVFFSAKSIKFYNPSEDILRIRNHSTHTKNGSPQKGYEKFEFNIEDCRKFIDFYKQSISKHPEWKDFGFRFSDTQRYNSIDEFYREVENQGYKLTFENISESYIDSVVNQGKLYLFQIYNKDFSAYSKGRPNLHTLYWKALFDERNLQDVVYKLNGEAELFYRKQSIPKKITHPAKEAIANKNKDNPKKESVFEYDLIKDKRFTEDKFFFHCPITINFKSSGANKFNDEINLLLKEKANDVHILSIDRGERHLAYYTLVDGKGNIIKQDTFNIIGNDRMKTNYHDKLAAIEKDRDSARKDWKKINNIKEMKEGYLSQVVHEIAKLVIEYNAIVVFEDLNFGFKRGRFKVEKQVYQKLEKMLIEKLNYLVFKDNEFDKTGGVLRAYQLTAPFETFKKMGKQTGIIYYVPAGFTSKICPVTGFVNQLYPKYESVSKSQEFFSKFDKICYNLDKGYFEFSFDYKNFGDKAAKGKWTIASFGSRLINFRNSDKNHNWDTREVYPTKELEKLLKDYSIEYGHGECIKAAICGESDKKFFAKLTSVLNTILQMRNSKTGTELDYLISPVADVNGNFFDSRQAPKNMPQDADANGAYHIGLKGLMLLGRIKNNQEGKKLNLVIKNEEYFEFVQNRNN

SEQ ID NO: 5 - protein, 986 aa, synthetic construct
MEKRINKIRKKLSADNATKPVSRSGPMKTLLVRVMTDDLKKRLEKRRKKPEVMPQVISNNAANNLRMLLDDYTKMKEAILQVYWQEFKDDHVGLMCKFAQPASKKIDQNKLKPEMDEKGNLTTAGFACSQCGQPLFVYKLEQVSEKGKAYTNYFGRCNVAEHEKLILLAQLKPEKDSDEAVTYSLGKFGQRALDFYSIHVTKESTHPVKPLAQIAGNRYASGPVGKALSDACMGTIASFLSKYQDIIIEHQKVVKGNQKRLESLRELAGKENLEYPSVTLPPQPHTKEGVDAYNEVIARVRMWVNLNLWQKLKLSRDDAKPLLRLKGFPSFPVVERRENEVDWWNTINEVKKLIDAKRDMGRVFWSGVTAEKRNTILEGYNYLPNENDHKKREGSLENPKKPAKRQFGDLLLYLEKKYAGDWGKVFDEAWERIDKKIAGLTSHIEREEARNAEDAQSKAVLTDWLRAKASFVLERLKEMDEKEFYACEIQLQKWYGDLRGNPFAVEAENRVVDISGFSIGSDGHSIQYRNLLAWKYLENGKREFYLLMNYGKKGRIRFTDGTDIKKSGKWQGLLYGGGKAKVIDLTFDPDDEQLIILPLAFGTRQGREFIWNDLLSLETGLIKLANGRVIEKTIYNKKIGRDEPALFVALTFERREVVDPSNIKPVNLIGVDRGENIPAVIALTDPEGCPLPEFKDSSGGPTDILRIGEGYKEKQRAIQAAKEVEQRRAGGYSRKFASKSRNLADDMVRNSARDLFYHAVTHDAVLVFENLSRGFGRQGKRTFMTERQYTKMEDWLTAKLAYEGLTSKTYLSKTLAQYTSKTCSNCGFTITTADYDGMLVRLKKTSDGWATTLNNKELKAEGQITYYNRYKRQTVEKELSAELDRLSEESGNNDISKWTKGRRDEALFLLKKRFSHRPVQEQFVCLDCGHEVHADEQAALNIARSWLFLNSNSTEFKSYKSGKQPFVGAWQAFYKRRLKEVWKPNA

SEQ ID NO: 6 - protein, 1125 aa, synthetic construct
MRKKLFKGYILHNKRLVYTGKAAIRSIKYPLVAPNKTALNNLSEKIIYDYEHLFGPLNVASYARNSNRYSLVDFWIDSLRAGVIWQSKSTSLIDLISKLEGSKSPSEKIFEQIDFELKNKLDKEQFKDIILLNTGIRSSSNVRSLRGRFLKCFKEEFRDTEEVIACVDKWSKDLIVEGKSILVSKQFLYWEEEFGIKIFPHFKDNHDLPKLTFFVEPSLEFSPHLPLANCLERLKKFDISRESLLGLDNNFSAFSNYFNELFNLLSRGEIKKIVTAVLAVSKSWENEPELEKRLHFLSEKAKLLGYPKLTSSWADYRMIIGGKIKSWHSNYTEQLIKVREDLKKHQIALDKLQEDLKKVVDSSLREQIEAQREALLPLLDTMLKEKDFSDDLELYRFILSDFKSLLNGSYQRYIQTEEERKEDRDVTKKYKDLYSNLRNIPRFFGESKKEQFNKFINKSLPTIDVGLKILEDIRNALETVSVRKPPSITEEYVTKQLEKLSRKYKINAFNSNRFKQITEQVLRKYNNGELPKISEVFYRYPRESHVAIRILPVKISNPRKDISYLLDKYQISPDWKNSNPGEVVDLIEIYKLTLGWLLSCNKDFSMDFSSYDLKLFPEAASLIKNFGSCLSGYYLSKMIFNCITSEIKGMITLYTRDKFVVRYVTQMIGSNQKFPLLCLVGEKQTKNFSRNWGVLIEEKGDLGEEKNQEKCLIFKDKTDFAKAKEVEIFKNNIWRIRTSKYQIQFLNRLFKKTKEWDLMNLVLSEPSLVLEEEWGVSWDKDKLLPLLKKEKSCEERLYYSLPLNLVPATDYKEQSAEIEQRNTYLGLDVGEFGVAYAVVRIVRDRIELLSWGFLKDPALRKIRERVQDMKKKQVMAVFSSSSTAVARVREMAIHSLRNQIHSIALAYKAKIIYEISISNFETGGNRMAKIYRSIKVSDVYRESGADTLVSEMIWGKKNKQMGNHISSYATSYTCCNCARTPFELVIDNDKEYEKGGDEFIFNVGDEKKVRGFLQKSLLGKTIKGKEVLKSIKEYARPPIREVLLEGEDVEQLLKRRGNSYIYRCPFCGYKTDADIQAALNIACRGYISDNAKDAVKEGERKLDYILEVRKLWEKNGAVLRSAKFL

SEQ ID NO: 7 - protein, 707 aa, synthetic construct
MADTPTLFTQFLRHHLPGQRFRKDILKQAGRILANKGEDATIAFLRGKSEESPPDFQPPVKCPIIACSRPLTEWPIYQASVAIQGYVYGQSLAEFEASDPGCSKDGLLGWFDKTGVCTDYFSVQGLNLIFQNARKRYIGVQTKVTNRNEKRHKKLKRINAKRIAEGLPELTSDEPESALDETGHLIDPPGLNTNIYCYQQVSPKPLALSEVNQLPTAYAGYSTSGDDPIQPMVTKDRLSISKGQPGYIPEHQRALLSQKKHRRMRGYGLKARALLVIVRIQDDWAVIDLRSLLRNAYWRRIVQTKEPSTITKLLKLVTGDPVLDATRMVATFTYKPGIVQVRSAKCLKNKQGSKLFSERYLNETVSVTSIDLGSNNLVAVATYRLVNGNTPELLQRFTLPSHLVKDFERYKQAHDTLEDSIQKTAVASLPQGQQTEIRMWSMYGFREAQERVCQELGLADGSIPWNVMTATSTILTDLFLARGGDPKKCMFTSEPKKKKNSKQVLYKIRDRAWAKMYRTLLSKETREAWNKALWGLKRGSPDYARLSKRKEELARRCVNYTISTAEKRAQCGRTIVALEDLNIGFFHGRGKQEPGWVGLFTRKKENRWLMQALHKAFLELAHHRGYHVIEVNPAYTSQTCPVCRHCDPDNRDQHNREAFHCIGCGFRGNADLDVATHNIAMVAITGESLKRARGSVASKTPQPLAAE

SEQ ID NO: 8 - protein, 426 aa, synthetic construct
MIKVYRYEIVKPLDLDWKEFGTILRQLQQETRFALNKATQLAWEWMGFSSDYKDNHGEYPKSKDILGYTNVHGYAYHTIKTKAYRLNSGNLSQTIKRATDRFKAYQKEILRGDMSIPSYKRDIPLDLIKENISVNRMNHGDYIASLSLLSNPAKQEMNVKRKISVIIIVRGAGKTIMDRILSGEYQVSASQIIHDDRKNKWYLNISYDFEPQTRVLDLNKIMGIDLGVAVAVYMAFQHTPARYKLEGGEIENFRRQVESRRISMLRQGKYAGGARGGHGRDKRIKPIEQLRDKIANFRDTTNHRYSRYIVDMAIKEGCGTIQMEDLTNIRDIGSRFLQNWTYYDLQQKIIYKAEEAGIKVIKIDPQYTSQRCSECGNIDSGNRIGQAIFKCRACGYEANADYNAARNIAIPNIDKIIAESIKSGGS

SEQ ID NO: 9 - protein, 509 aa, synthetic construct
NAMIAQKTIKIKLNPTKEQIIKLNSIIEEYIKVSNFTAKKIAEIQESFTDSGLTQGTCSECGKEKTYRKYHLLKKDNKLFCITCYKRKYSQFTLQKVEFQNKTGLRNVAKLPKTYYTNAIRFASDTFSGFDEIIKKKQNRLNSIQNRLNFWKELLYNPSNRNEIKIKVVKYAPKTDTREHPHYYSEAEIKGRIKRLEKQLKKFKMPKYPEFTSETISLQRELYSWKNPDELKISSITDKNESMNYYGKEYLKRYIDLINSQTPQILLEKENNSFYLCFPITKNIEMPKIDDTFEPVGIDWGITRNIAVVSILDSKTKKPKFVKFYSAGYILGKRKHYKSLRKHFGQKKRQDKINKLGTKEDRFIDSNIHKLAFLIVKEIRNHSNKPIILMENITDNREEAEKSMRQNILLHSVKSRLQNYIAYKALWNNIPTNLVKPEHTSQICNRCGHQDRENRPKGSKLFKCVKCNYMSNADFNASINIARKFYIGEYEPFYKDNEKMKSGVNSISM

SEQ ID NO: 10 - protein, 501 aa, synthetic construct
MEVQKTVMKTLSLRILRPLYSQEIEKEIKEEEKERRKQAGGTGELDGGFYKKLEKKHSEMFSFDRLNLLLNQLQREIAKVYNHAISELYIATIAQGNKSNKHYISSIVYNRAYGYFYNAYIALGICSKVEANFRSNELLTQQSALPTAKSDNFPIVLHKQKGAEGEDGGFRISTEGSDLIFEIPIPFYEYNGENRKEPYKWVKKGGQKPVLKLILSTFRRQRNKGWAKDEGTDAEIRKVTEGKYQVSQIEINRGKKLGEHQKWFANFSIEQPIYERKPNRSIVGGLDVGIRSPLVCAINNSFSRYSVDSNDVFKFSKQVFAFRRRLLSKNSLKRKHGHAAHKLEPITEMTEKNDKFRKKIIERWAKEVTNFFVKNQVGIVQIEDLSTMKDREDHFFNQYLRGFWPYYQMQTLIENKLKEYGIEVKRVQAKYTSQLCSNPNCRYWNNYFNFEYRKVNKFPKFKCEKCNLEISADYNAARNLSTPDIEKFVAKATKGINLPEK

SEQ ID NO: 11 - protein, 582 aa, synthetic construct
MKVLEFKIHPTEEQVSKIDQSLAACKLLWNLSIALKEESKQRYYRKKHKFDEFSPEIWGLSYSGHYDEKEFKTLKDKEKKLLIGNPCCKIAYFKKTSNGKEYTPLNSIPIRRFMNAENIDKDAVNYLNRKKLAFYFRENTAKFIGEIETEFKKGFFKSVIKPAYDAAKKGIRGIPRFKGRRDKVETLVNGQPETIKIKSNGVIVSSKIGLLKIRGLDRLQGKAPRMAKITRKATGYYLQLTIETDDTIYKESDKCVGLDMGAVAIFTDDLGRQSEAKRYAKIQKKRLNRLQRQASRQKDNSNNQRKTYAKLARVHEKIARQRKGRNAQLAHKITSEYQSVILEDLNLKNMTAAAKPKEREDGDGYKQNGKKRKSGLNKALLDNAIGQLRTFIENKANERGRKIIRVNPKHTSQTCPNCGNIDKANRVSQSKFKCVSCGYEAHADQNAAANILIRGLRDEFLRAIGSLYKFPVSMIGKYPGLAGEFTPDLDANQESIGDAPIENAEHSISKQMKQEGNRTPTQPENGSQSLIFLSAPPQPCGDSHGTNNPKALPNKASKRSSKKPRGAIPENPDQLTIWDLLD

SEQ ID NO: 12 - protein, 1368 aa, synthetic construct
MDKKYSIGLAIGTNSVGWAVITDEYKVPSKKFKVLGNTDRHSIKKNLIGALLFDSGETAEATRLKRTARRRYTRRKNRICYLQEIFSNEMAKVDDSFFHRLEESFLVEEDKKHERHPIFGNIVDEVAYHEKYPTIYHLRKKLVDSTDKADLRLIYLALAHMIKFRGHFLIEGDLNPDNSDVDKLFIQLVQTYNQLFEENPINASGVDAKAILSARLSKSRRLENLIAQLPGEKKNGLFGNLIALSLGLTPNFKSNFDLAEDAKLQLSKDTYDDDLDNLLAQIGDQYADLFLAAKNLSDAILLSDILRVNTEITKAPLSASMIKRYDEHHQDLTLLKALVRQQLPEKYKEIFFDQSKNGYAGYIDGGASQEEFYKFIKPILEKMDGTEELLVKLNREDLLRKQRTFDNGSIPHQIHLGELHAILRRQEDFYPFLKDNREKIEKILTFRIPYYVGPLARGNSRFAWMTRKSEETITPWNFEEVVDKGASAQSFIERMTNFDKNLPNEKVLPKHSLLYEYFTVYNELTKVKYVTEGMRKPAFLSGEQKKAIVDLLFKTNRKVTVKQLKEDYFKKIECFDSVEISGVEDRFNASLGTYHDLLKIIKDKDFLDNEENEDILEDIVLTLTLFEDREMIEERLKTYAHLFDDKVMKQLKRRRYTGWGRLSRKLINGIRDKQSGKTILDFLKSDGFANRNFMQLIHDDSLTFKEDIQKAQVSGQGDSLHEHIANLAGSPAIKKGILQTVKVVDELVKVMGRHKPENIVIEMARENQTTQKGQKNSRERMKRIEEGIKELGSQILKEHPVENTQLQNEKLYLYYLQNGRDMYVDQELDINRLSDYDVDAIVPQSFLKDDSIDNKVLTRSDKNRGKSDNVPSEEVVKKMKNYWRQLLNAKLITQRKFDNLTKAERGGLSELDKAGFIKRQLVETRQITKHVAQILDSRMNTKYDENDKLIREVKVITLKSKLVSDFRKDFQFYKVREINNYHHAHDAYLNAVVGTALIKKYPKLESEFVYGDYKVYDVRKMIAKSEQEIGKATAKYFFYSNIMNFFKTEITLANGEIRKRPLIETNGETGEIVWDKGRDFATVRKVLSMPQVNIVKKTEVQTGGFSKESILPKRNSDKLIARKKDWDPKKYGGFDSPTVAYSVLVVAKVEKGKSKKLKSVKELLGITIMERSSFEKNPIDFLEAKGYKEVKKDLIIKLPKYSLFELENGRKRMLASAGELQKGNELALPSKYVNFLYLASHYEKLKGSPEDNEQKQLFVEQHKHYLDEIIEQISEFSKRVILADANLDKVLSAYNKHRDKPIREQAENIIHLFTLTNLGAPAAFKYFDTTIDRKRYTSTKEVLDATLIHQSITGLYETRIDLSQLGGD

SEQ ID NO: 13 - protein, 1053 aa, synthetic construct
MKRNYILGLAIGITSVGYGIIDYETRDVIDAGVRLFKEANVENNEGRRSKRGARRLKRRRRHRIQRVKKLLFDYNLLTDHSELSGINPYEARVKGLSQKLSEEEFSAALLHLAKRRGVHNVNEVEEDTGNELSTKEQISRNSKALEEKYVAELQLERLKKDGEVRGSINRFKTSDYVKEAKQLLKVQKAYHQLDQSFIDTYIDLLETRRTYYEGPGEGSPFGWKDIKEWYEMLMGHCTYFPEELRSVKYAYNADLYNALNDLNNLVITRDENEKLEYYEKFQIIENVFKQKKKPTLKQIAKEILVNEEDIKGYRVTSTGKPEFTNLKVYHDIKDITARKEIIENAELLDQIAKILTIYQSSEDIQEELTNLNSELTQEEIEQISNLKGYTGTHNLSLKAINLILDELWHTNDNQIAIFNRLKLVPKKVDLSQQKEIPTTLVDDFILSPVVKRSFIQSIKVINAIIKKYGLPNDIIIELAREKNSKDAQKMINEMQKRNRQTNERIEEIIRTTGKENAKYLIEKIKLHDMQEGKCLYSLEAIPLEDLLNNPFNYEVDHIIPRSVSFDNSFNNKVLVKQEEASKKGNRTPFQYLSSSDSKISYETFKKHILNLAKGKGRISKTKKEYLLEERDINRFSVQKDFINRNLVDTRYATRGLMNLLRSYFRVNNLDVKVKSINGGFTSFLRRKWKFKKERNKGYKHHAEDALIIANADFIFKEWKKLDKAKKVMENQMFEEKQAESMPEIETEQEYKEIFITPHQIKHIKDFKDYKYSHRVDKKPNRELINDTLYSTRKDDKGNTLIVNNLNGLYDKDNDKLKKLINKSPEKLLMYHHDPQTYQKLKLIMEQYGDEKNPLYKYYEETGNYLTKYSKKDNGPVIKKIKYYGNKLNAHLDITDDYPNSRNKVVKLSLKPYRFDVYLDNGVYKFVTVKNLDVIKKENYYEVNSKCYEEAKKLKKISNQAEFIASFYNNDLIKINGELYRVIGVNNDLLNRIEVNMIDITYREYLENMNDKRPPRIIKTIASKTQSIKKYSTDILGNLYEVKSKKHPQIIKKG

SEQ ID NO: 14 - protein, 1300 aa, synthetic construct
MSIYQEFVNKYSLSKTLRFELIPQGKTLENIKARGLILDDEKRAKDYKKAKQIIDKYHQFFIEEILSSVCISEDLLQNYSDVYFKLKKSDDDNLQKDFKSAKDTIKKQISEYIKDSEKFKNLFNQNLIDAKKGQESDLILWLKQSKDNGIELFKANSDITDIDEALEIIKSFKGWTTYFKGFHENRKNVYSSNDIPTSIIYRIVDDNLPKFLENKAKYESLKDKAPEAINYEQIKKDLAEELTFDIDYKTSEVNQRVFSLDEVFEIANFNNYLNQSGITKFNTIIGGKFVNGENTKRKGINEYINLYSQQINDKTLKKYKMSVLFKQILSDTESKSFVIDKLEDDSDVVTTMQSFYEQIAAFKTVEEKSIKETLSLLFDDLKAQKLDLSKIYFKNDKSLTDLSQQVFDDYSVIGTAVLEYITQQIAPKNLDNPSKKEQELIAKKTEKAKYLSLETIKLALEEFNKHRDIDKQCRFEEILANFAAIPMIFDEIAQNKDNLAQISIKYQNQGKKDLLQASAEDDVKAIKDLLDQTNNLLHKLKIFHISQSEDKANILDKDEHFYLVFEECYFELANIVPLYNKIRNYITQKPYSDEKFKLNFENSTLANGWDKNKEPDNTAILFIKDDKYYLGVMNKKNNKIFDDKAIKENKGEGYKKIVYKLLPGANKMLPKVFFSAKSIKFYNPSEDILRIRNHSTHTKNGSPQKGYEKFEFNIEDCRKFIDFYKQSISKHPEWKDFGFRFSDTQRYNSIDEFYREVENQGYKLTFENISESYIDSVVNQGKLYLFQIYNKDFSAYSKGRPNLHTLYWKALFDERNLQDVVYKLNGEAELFYRKQSIPKKITHPAKEAIANKNKDNPKKESVFEYDLIKDKRFTEDKFFFHCPITINFKSSGANKFNDEINLLLKEKANDVHILSIARGERHLAYYTLVDGKGNIIKQDTFNIIGNDRMKTNYHDKLAAIEKDRDSARKDWKKINNIKEMKEGYLSQVVHEIAKLVIEYNAIVVFEDLNFGFKRGRFKVEKQVYQKLEKMLIEKLNYLVFKDNEFDKTGGVLRAYQLTAPFETFKKMGKQTGIIYYVPAGFTSKICPVTGFVNQLYPKYESVSKSQEFFSKFDKICYNLDKGYFEFSFDYKNFGDKAAKGKWTIASFGSRLINFRNSDKNHNWDTREVYPTKELEKLLKDYSIEYGHGECIKAAICGESDKKFFAKLTSVLNTILQMRNSKTGTELDYLISPVADVNGNFFDSRQAPKNMPQDADANGAYHIGLKGLMLLGRIKNNQEGKKLNLVIKNEEYFEFVQNRNN

SEQ ID NO: 15 - protein, 1082 aa, synthetic construct
MAAFKPNSINYILGLAIGIASVGWAMVEIDEEENPIRLIDLGVRVFERAEVPKTGDSLAMARRLARSVRRLTRRRAHRLLRTRRLLKREGVLQAANFDENGLIKSLPNTPWQLRAAALDRKLTPLEWSAVLLHLIKHRGYLSQRKNEGETADKELGALLKGVAGNAHALQTGDFRTPAELALNKFEKESGHIRNQRSDYSHTFSRKDLQAELILLFEKQKEFGNPHVSGGLKEGIETLLMTQRPALSGDAVQKMLGHCTFEPAEPKAAKNTYTAERFIWLTKLNNLRILEQGSERPLTDTERATLMDEPYRKSKLTYAQARKLLGLEDTAFFKGLRYGKDNAEASTLMEMKAYHAISRALEKEGLKDKKSPLNLSPELQDEIGTAFSLFKTDEDITGRLKDRIQPEILEALLKHISFDKFVQISLKALRRIVPLMEQGKRYDEACAEIYGDHYGKKNTEEKIYLPPIPADEIRNPVVLRALSQARKVINGVVRRYGSPARIHIETAREVGKSFKDRKEIEKRQEENRKDREKAAAKFREYFPNFVGEPKSKDILKLRLYEQQHGKCLYSGKEINLGRLNEKGYVEIDAALPFSRTWDDSFNNKVLVLGSENQNKGNQTPYEYFNGKDNSREWQEFKARVETSRFPRSKKQRILLQKFDEDGFKERNLNDTRYVNRFLCQFVADRMRLTGKGKKRVFASNGQITNLLRGFWGLRKVRAENDRHHALDAVVVACSTVAMQQKITRFVRYKEMNAFDGKTIDKETGEVLHQKTHFPQPWEFFAQEVMIRVFGKPDGKPEFEEADTLEKLRTLLAEKLSSRPEAVHEYVTPLFVSRAPNRKMSGQGHMETVKSAKRLDEGVSVLRVPLTQLKLKDLEKMVNREREPKLYEALKARLEAHKDDPAKAFAEPFYKYDKAGNRTQQVKAVRVEQVQKTGVWVRNHNGIADNATMVRVDVFEKGDKYYLVPIYSWQVAKGILPDRAVVQGKDEEDWQLIDDSFNFKFSLHPNDLVEVITKKARMFGYFASCHRGTGNINIRIHDLDHKIGKNGILEGIGVKTALSFQKYQIDELGKEIRPCRLKKRPPVR

SEQ ID NO: 16 - protein, 984 aa, synthetic construct
MARILAFAIGISSIGWAFSENDELKDCGVRIFTKVENPKTGESLALPRRLARSARKRLARRKARLNHLKHLIANEFKLNYEDYQSFDESLAKAYKGSLISPYELRFRALNELLSKQDFARVILHIAKRRGYDDIKNSDDKEKGAILKAIKQNEEKLANYQSVGEYLYKEYFQKFKENSKEFTNVRNKKESYERCIAQSFLKDELKLIFKKQREFGFSFSKKFEEEVLSVAFYKRALKDFSHLVGNCSFFTDEKRAPKNSPLAFMFVALTRIINLLNNLKNTEGILYTKDDLNALLNEVLKNGTLTYKQTKKLLGLSDDYEFKGEKGTYFIEFKKYKEFIKALGEHNLSQDDLNEIAKDITLIKDEIKLKKALAKYDLNQNQIDSLSKLEFKDHLNISFKALKLVTPLMLEGKKYDEACNELNLKVAINEDKKDFLPAFNETYYKDEVTNPVVLRAIKEYRKVLNALLKKYGKVHKINIELAREVGKNHSQRAKIEKEQNENYKAKKDAELECEKLGLKINSKNILKLRLFKEQKEFCAYSGEKIKISDLQDEKMLEIDAIYPYSRSFDDSYMNKVLVFTKQNQEKLNQTPFEAFGNDSAKWQKIEVLAKNLPTKKQKRILDKNYKDKEQKNFKDRNLNDTRYIARLVLNYTKDYLDFLPLSDDENTKLNDTQKGSKVHVEAKSGMLTSALRHTWGFSAKDRNNHLHHAIDAVIIAYANNSIVKAFSDFKKEQESNSAELYAKKISELDYKNKRKFFEPFSGFRQKVLDKIDEIFVSKPERKKPSGALHEETFRKEEEFYQSYGGKEGVLKALELGKIRKVNGKIVKNGDMFRVDIFKHKKTNKFYAVPIYTMDFALKVLPNKAVARSKKGEIKDWILMDENYEFCFSLYKDSLILIQTKDMQEPEFVYYNAFTSSTVSLIVSKHDNKFETLSKNQKILFKNANEKEVIAKSIGIQNLKVFEKYIVSALGEVTKAEFRQREDFKK

SEQ ID NO: 17 - protein, 1122 aa, synthetic construct
MGSDLVLGLAIGIGSVGVGILNKVTGEIIHKNSRIFPAAQAENNLVRRTNRQGRRLARRKKHRRVRLNRLFEESGLITDFTKISINLNPYQLRVKGLTDELSNEELFIALKNMVKHRGISYLDDASDDGNSSVGDYAQIVKENSKQLETKTPGQIQLERYQTYGQLRGDFTVEKDGKKHRLINVFPTSAYRSEALRILQTQQEFNPQITDEFINRYLEILTGKRKYYHGPGNEKSRTDYGRYRTSGETLDNIFGILIGKCTFYPDEFRAAKASYTAQEFNLLNDLNNLTVPTETKKLSKEQKNQIINYVKNEKAMGPAKLFKYIAKLLSCDVADIKGYRIDKSGKAEIHTFEAYRKMKTLETLDIEQMDRETLDKLAYVLTLNTEREGIQEALEHEFADGSFSQKQVDELVQFRKANSSIFGKGWHNFSVKLMMELIPELYETSEEQMTILTRLGKQKTTSSSNKTKYIDEKLLTEEIYNPVVAKSVRQAIKIVNAAIKEYGDFDNIVIEMARETNEDDEKKAIQKIQKANKDEKDAAMLKAANQYNGKAELPHSVFHGHKQLATKIRLWHQQGERCLYTGKTISIHDLINNSNQFEVDAILPLSITFDDSLANKVLVYATANQEKGQRTPYQALDSMDDAWSFRELKAFVRESKTLSNKKKEYLLTEEDISKFDVRKKFIERNLVDTRYASRVVLNALQEHFRAHKIDTKVSVVRGQFTSQLRRHWGIEKTRDTYHHHAVDALIIAASSQLNLWKKQKNTLVSYSEDQLLDIETGELISDDEYKESVFKAPYQHFVDTLKSKEFEDSILFSYQVDSKFNRKISDATIYATRQAKVGKDKADETYVLGKIKDIYTQDGYDAFMKIYKKDKSKFLMYRHDPQTFEKVIEPILENYPNKQINEKGKEVPCNPFLKYKEEHGYIRKYSKKGNGPEIKSLKYYDSKLGNHIDITPKDSNNKVVLQSVSPWRADVYFNKTTGKYEILGLKYADLQFEKGTGTYKISQEKYNDIKKKEGVDSDSEFKFTLYKNDLLLVKDTETKEQQLFRFLSRTMPKQKHYVELKPYDKQKFEGGEALIKVLGNVANSGQCKKGLGKSNISIYKVRTDVLGNQHIIKNEGDKPKLDF

SEQ ID NO: 18 - protein, 1388 aa, synthetic construct
MTKPYSIGLAIGTNSVGWAVITDNYKVPSKKMKVLGNTSKKYIKKNLLGVLLFDSGITAEGRRLKRTARRRYTRRRNRILYLQEIFSTEMATLDDAFFQRLDDSFLVPDDKRDSKYPIFGNLVEEKVYHDEFPTIYHLRKYLADSTKKADLRLVYLALAHMIKYRGHFLIEGEFNSKNNDIQKNFQDFLDTYNAIFESDLSLENSKQLEEIVKDKISKLEKKDRILKLFPGEKNSGIFSEFLKLIVGNQADFRKCFNLDEKASLHFSKESYDEDLETLLGYIGDDYSDVFLKAKKLYDAILLSGFLTVTDNETEAPLSSAMIKRYNEHKEDLALLKEYIRNISLKTYNEVFKDDTKNGYAGYIDGKTNQEDFYVYLKNLLAEFEGADYFLEKIDREDFLRKQRTFDNGSIPYQIHLQEMRAILDKQAKFYPFLAKNKERIEKILTFRIPYYVGPLARGNSDFAWSIRKRNEKITPWNFEDVIDKESSAEAFINRMTSFDLYLPEEKVLPKHSLLYETFNVYNELTKVRFIAESMRDYQFLDSKQKKDIVRLYFKDKRKVTDKDIIEYLHAIYGYDGIELKGIEKQFNSSLSTYHDLLNIINDKEFLDDSSNEAIIEEIIHTLTIFEDREMIKQRLSKFENIFDKSVLKKLSRRHYTGWGKLSAKLINGIRDEKSGNTILDYLIDDGISNRNFMQLIHDDALSFKKKIQKAQIIGDEDKGNIKEVVKSLPGSPAIKKGILQSIKIVDELVKVMGGRKPESIVVEMARENQYTNQGKSNSQQRLKRLEKSLKELGSKILKENIPAKLSKIDNNALQNDRLYLYYLQNGKDMYTGDDLDIDRLSNYDIDHIIPQAFLKDNSIDNKVLVSSASARGKSDDFPSLEVVKKRKTFWYQLLKSKLISQRKFDNLTKAERGGLLPEDKAGFIQRQLVETRQITKHVARLLDEKFNNKKDENNRAVRTVKIITLKSTLVSQFRKDFELYKVREINDFHHAHDAYLNAVIASALLKKYPKLEPEFVYGDYPKYNSFRERKSATEKVYFYSNIMNIFKKSISLADGRVIERPLIEVNEETGESVWNKESDLATVRRVLSYPQVNVVKKVEEQNHGLDRGKPKGLFNANLSSKPKPNSNENLVGAKEYLDPKKYGGYAGISNSFAVLVKGTIEKGAKKKITNVLEFQGISILDRINYRKDKLNFLLEKGYKDIELIIELPKYSLFELSDGSRRMLASILSTNNKRGEIHKGNQIFLSQKFVKLLYHAKRISNTINENHRKYVENHKKEFEELFYYILEFNENYVGAKKNGKLLNSAFQSWQNHSIDELCSSFIGPTGSERKGLFELTSRGSAADFEFLGVKIPRYRDYTPSSLLKDATLIHQSVTGLYETRIDLAKLGEG

SEQ ID NO: 19 - protein, 1228 aa, synthetic construct
MSKLEKFTNCYSLSKTLRFKAIPVGKTQENIDNKRLLVEDEKRAEDYKGVKKLLDRYYLSFINDVLHSIKLKNLNNYISLFRKKTRTEKENKELENLEINLRKEIAKAFKGNEGYKSLFKKDIIETILPEFLDDKDEIALVNSFNGFTTAFTGFFDNRENMFSEEAKSTSIAFRCINENLTRYISNMDIFEKVDAIFDKHEVQEIKEKILNSDYDVEDFFEGEFFNFVLTQEGIDVYNAIIGGFVTESGEKIKGLNEYINLYNQKTKQKLPKFKPLYKQVLSDRESLSFYGEGYTSDEEVLEVFRNTLNKNSEIFSSIKKLEKLFKNFDEYSSAGIFVKNGPAISTISKDIFGEWNVIRDKWNAEYDDIHLKKKAVVTEKYEDDRRKSFKKIGSFSLEQLQEYADADLSVVEKLKEIIIQKVDEIYKVYGSSEKLFDADFVLEKSLKKNDAVVAIMKDLLDSVKSFENYIKAFFGEGKETNRDESFYGDFVLAYDILLKVDHIYDAIRNYVTQKPYSKDKFKLYFQNPQFMGGWDKDKETDYRATILRYGSKYYLAIMDKKYAKCLQKIDKDDVNGNYEKINYKLLPGPNKMLPKVFFSKKWMAYYNPSEDIQKIYKNGTFKKGDMFNLNDCHKLIDFFKDSISRYPKWSNAYDFNFSETEKYKDIAGFYREVEEQGYKVSFESASKKEVDKLVEEGKLYMFQIYNKDFSDKSHGTPNLHTMYFKLLFDENNHGQIRLSGGAELFMRRASLKKEELVVHPANSPIANKNPDNPKKTTTLSYDVYKDKRFSEDQYELHIPIAINKCPKNIFKINTEVRVLLKHDDNPYVIGIARGERNLLYIVVVDGKGNIVEQYSLNEIINNFNGIRIKTDYHSLLDKKEKERFEARQNWTSIENIKELKAGYISQVVHKICELVEKYDAVIALEDLNSGFKNSRVKVEKQVYQKFEKMLIDKLNYMVDKKSNPCATGGALKGYQITNKFESFKSMSTQNGFIFYIPAWLTSKIDPSTGFVNLLKTKYTSIADSKKFISSFDRIMYVPEEDLFEFALDYKNFSRTDADYIKKWKLYSYGNRIRIFRNPKKNNVFDWEEVCLTSAYKELFNKYGINYQQGDIRALLCEQSDKAFYSSFMALMSLMLQMRNSITGRTDVDFLISPVKNSDGIFYDSRNYEAQENAILPKNADANGAYNIARKVLWAIGQFKKAEDEKLDKVKIAISNKEWLEYAQTSVKH

SEQ ID NO: 20 - protein, 1307 aa, synthetic construct
MTQFEGFTNLYQVSKTLRFELIPQGKTLKHIQEQGFIEEDKARNDHYKELKPIIDRIYKTYADQCLQLVQLDWENLSAAIDSYRKEKTEETRNALIEEQATYRNAIHDYFIGRTDNLTDAINKRHAEIYKGLFKAELFNGKVLKQLGTVTTTEHENALLRSFDKFTTYFSGFYENRKNVFSAEDISTAIPHRIVQDNFPKFKENCHIFTRLITAVPSLREHFENVKKAIGIFVSTSIEEVFSFPFYNQLLTQTQIDLYNQLLGGISREAGTEKIKGLNEVLNLAIQKNDETAHIIASLPHRFIPLFKQILSDRNTLSFILEEFKSDEEVIQSFCKYKTLLRNENVLETAEALFNELNSIDLTHIFISHKKLETISSALCDHWDTLRNALYERRISELTGKITKSAKEKVQRSLKHEDINLQEIISAAGKELSEAFKQKTSEILSHAHAALDQPLPTTLKKQEEKEILKSQLDSLLGLYHLLDWFAVDESNEVDPEFSARLTGIKLEMEPSLSFYNKARNYATKKPYSVEKFKLNFQMPTLASGWDVNKEKNNGAILFVKNGLYYLGIMPKQKGRYKALSFEPTEKTSEGFDKMYYDYFPDAAKMIPKCSTQLKAVTAHFQTHTTPILLSNNFIEPLEITKEIYDLNNPEKEPKKFQTAYAKKTGDQKGYREALCKWIDFTRDFLSKYTKTTSIDLSSLRPSSQYKDLGEYYAELNPLLYHISFQRIAEKEIMDAVETGKLYLFQIYNKDFAKGHHGKPNLHTLYWTGLFSPENLAKTSIKLNGQAELFYRPKSRMKRMAHRLGEKMLNKKLKDQKTPIPDTLYQELYDYVNHRLSHDLSDEARALLPNVITKEVSHEIIKDRRFTSDKFFFHVPITLNYQAANSPSKFNQRVNAYLKEHPETPIIGIARGERNLIYITVIDSTGKILEQRSLNTIQQFDYQKKLDNREKERVAARQAWSVVGTIKDLKQGYLSQVIHEIVDLMIHYQAVVVLENLNFGFKSKRTGIAEKAVYQQFEKMLIDKLNCLVLKDYPAEKVGGVLNPYQLTDQFTSFAKMGTQSGFLFYVPAPYTSKIDPLTGFVDPFVWKTIKNHESRKHFLEGFDFLHYDVKTGDFILHFKMNRNLSFQRGLPGFMPAWDIVFEKNETQFDAKGTPFIAGKRIVPVIENHRFTGRYRDLYPANELIALLEEKGIVFRDGSNILPKLLENDDSHAIDTMVALIRSVLQMRNSNAATGEDYINSPVRDLNGVCFDSRFQNPEWPMDADANGAYHIALKGQLLLNHLKESKDLKLQNGISNQDWLAYIQELRN

SEQ ID NO: 21 - protein, 1307 aa, synthetic construct
MTQFEGFTNLYQVSKTLRFELIPQGKTLKHIQEQGFIEEDKARNDHYKELKPIIDRIYKTYADQCLQLVQLDWENLSAAIDSYRKEKTEETRNALIEEQATYRNAIHDYFIGRTDNLTDAINKRHAEIYKGLFKAELFNGKVLKQLGTVTTTEHENALLRSFDKFTTYFSGFYRNRKNVFSAEDISTAIPHRIVQDNFPKFKENCHIFTRLITAVPSLREHFENVKKAIGIFVSTSIEEVFSFPFYNQLLTQTQIDLYNQLLGGISREAGTEKIKGLNEVLNLAIQKNDETAHIIASLPHRFIPLFKQILSDRNTLSFILEEFKSDEEVIQSFCKYKTLLRNENVLETAEALFNELNSIDLTHIFISHKKLETISSALCDHWDTLRNALYERRISELTGKITKSAKEKVQRSLKHEDINLQEIISAAGKELSEAFKQKTSEILSHAHAALDQPLPTTLKKQEEKEILKSQLDSLLGLYHLLDWFAVDESNEVDPEFSARLTGIKLEMEPSLSFYNKARNYATKKPYSVEKFKLNFQMPTLARGWDVNREKNNGAILFVKNGLYYLGIMPKQKGRYKALSFEPTEKTSEGFDKMYYDYFPDAAKMIPKCSTQLKAVTAHFQTHTTPILLSNNFIEPLEITKEIYDLNNPEKEPKKFQTAYAKKTGDQKGYREALCKWIDFTRDFLSKYTKTTSIDLSSLRPSSQYKDLGEYYAELNPLLYHISFQRIAEKEIMDAVETGKLYLFQIYNKDFAKGHHGKPNLHTLYWTGLFSPENLAKTSIKLNGQAELFYRPKSRMKRMAHRLGEKMLNKKLKDQKTPIPDTLYQELYDYVNHRLSHDLSDEARALLPNVITKEVSHEIIKDRRFTSDKFFFHVPITLNYQAANSPSKFNQRVNAYLKEHPETPIIGIARGERNLIYITVIDSTGKILEQRSLNTIQQFDYQKKLDNREKERVAARQAWSVVGTIKDLKQGYLSQVIHEIVDLMIHYQAVVVLENLNFGFKSKRTGIAEKAVYQQFEKMLIDKLNCLVLKDYPAEKVGGVLNPYQLTDQFTSFAKMGTQSGFLFYVPAPYTSKIDPLTGFVDPFVWKTIKNHESRKHFLEGFDFLHYDVKTGDFILHFKMNRNLSFQRGLPGFMPAWDIVFEKNETQFDAKGTPFIAGKRIVPVIENHRFTGRYRDLYPANELIALLEEKGIVFRDGSNILPKLLENDDSHAIDTMVALIRSVLQMRNSNAATGEDYINSPVRDLNGVCFDSRFQNPEWPMDADANGAYHIALKGQLLLNHLKESKDLKLQNGISNQDWLAYIQELRN

SEQ ID NO: 22 - protein, 1307 aa, synthetic construct
MTQFEGFTNLYQVSKTLRFELIPQGKTLKHIQEQGFIEEDKARNDHYKELKPIIDRIYKTYADQCLQLVQLDWENLSAAIDSYRKEKTEETRNALIEEQATYRNAIHDYFIGRTDNLTDAINKRHAEIYKGLFKAELFNGKVLKQLGTVTTTEHENALLRSFDKFTTYFSGFYRNRKNVFSAEDISTAIPHRIVQDNFPKFKENCHIFTRLITAVPSLREHFENVKKAIGIFVSTSIEEVFSFPFYNQLLTQTQIDLYNQLLGGISREAGTEKIKGLNEVLALAIQKNDETAHIIASLPHRFIPLFKQILSDRNTLSFILEEFKSDEEVIQSFCKYKTLLRNENVLETAEALFNELNSIDLTHIFISHKKLETISSALCDHWDTLRNALYERRISELTGKITKSAKEKVQRSLKHEDINLQEIISAAGKELSEAFKQKTSEILSHAHAALDQPLPTTLKKQEEKEILKSQLDSLLGLYHLLDWFAVDESNEVDPEFSARLTGIKLEMEPSLSFYNKARNYATKKPYSVEKFKLNFQMPTLARGWDVNREKNNGAILFVKNGLYYLGIMPKQKGRYKALSFEPTEKTSEGFDKMYYDYFPDAAKMIPKCSTQLKAVTAHFQTHTTPILLSNNFIEPLEITKEIYDLNNPEKEPKKFQTAYAKKTGDQKGYREALCKWIDFTRDFLSKYTKTTSIDLSSLRPSSQYKDLGEYYAELNPLLYHISFQRIAEKEIMDAVETGKLYLFQIYNKDFAKGHHGKPNLHTLYWTGLFSPENLAKTSIKLNGQAELFYRPKSRMKRMAHRLGEKMLNKKLKDQKTPIPDTLYQELYDYVNHRLSHDLSDEARALLPNVITKEVSHEIIKDRRFTSDKFFFHVPITLNYQAANSPSKFNQRVNAYLKEHPETPIIGIARGERNLIYITVIDSTGKILEQRSLNTIQQFDYQKKLDNREKERVAARQAWSVVGTIKDLKQGYLSQVIHEIVDLMIHYQAVVVLENLNFGFKSKRTGIAEKAVYQQFEKMLIDKLNCLVLKDYPAEKVGGVLNPYQLTDQFTSFAKMGTQSGFLFYVPAPYTSKIDPLTGFVDPFVWKTIKNHESRKHFLEGFDFLHYDVKTGDFILHFKMNRNLSFQRGLPGFMPAWDIVFEKNETQFDAKGTPFIAGKRIVPVIENHRFTGRYRDLYPANELIALLEEKGIVFRDGSNILPKLLENDDSHAIDTMVALIRSVLQMRNSNAATGEDYINSPVRDLNGVCFDSRFQNPEWPMDADANGAYHIALKGQLLLNHLKESKDLKLQNGISNQDWLAYIQELRN

SEQ ID NO: 23 - protein, 1307 aa, synthetic construct
MTQFEGFTNLYQVSKTLRFELIPQGKTLKHIQEQGFIEEDKARNDHYKELKPIIDRIYKTYADQCLQLVQLDWENLSAAIDSYRKEKTEETRNALIEEQATYRNAIHDYFIGRTDNLTDAINKRHAEIYKGLFKAELFNGKVLKQLGTVTTTEHENALLRSFDKFTTYFSGFYENRKNVFSAEDISTAIPHRIVQDNFPKFKENCHIFTRLITAVPSLREHFENVKKAIGIFVSTSIEEVFSFPFYNQLLTQTQIDLYNQLLGGISREAGTEKIKGLNEVLNLAIQKNDETAHIIASLPHRFIPLFKQILSDRNTLSFILEEFKSDEEVIQSFCKYKTLLRNENVLETAEALFNELNSIDLTHIFISHKKLETISSALCDHWDTLRNALYERRISELTGKITKSAKEKVQRSLKHEDINLQEIISAAGKELSEAFKQKTSEILSHAHAALDQPLPTTLKKQEEKEILKSQLDSLLGLYHLLDWFAVDESNEVDPEFSARLTGIKLEMEPSLSFYNKARNYATKKPYSVEKFKLNFQMPTLARGWDVNVEKNRGAILFVKNGLYYLGIMPKQKGRYKALSFEPTEKTSEGFDKMYYDYFPDAAKMIPKCSTQLKAVTAHFQTHTTPILLSNNFIEPLEITKEIYDLNNPEKEPKKFQTAYAKKTGDQKGYREALCKWIDFTRDFLSKYTKTTSIDLSSLRPSSQYKDLGEYYAELNPLLYHISFQRIAEKEIMDAVETGKLYLFQIYNKDFAKGHHGKPNLHTLYWTGLFSPENLAKTSIKLNGQAELFYRPKSRMKRMAHRLGEKMLNKKLKDQKTPIPDTLYQELYDYVNHRLSHDLSDEARALLPNVITKEVSHEIIKDRRFTSDKFFFHVPITLNYQAANSPSKFNQRVNAYLKEHPETPIIGIARGERNLIYITVIDSTGKILEQRSLNTIQQFDYQKKLDNREKERVAARQAWSVVGTIKDLKQGYLSQVIHEIVDLMIHYQAVVVLENLNFGFKSKRTGIAEKAVYQQFEKMLIDKLNCLVLKDYPAEKVGGVLNPYQLTDQFTSFAKMGTQSGFLFYVPAPYTSKIDPLTGFVDPFVWKTIKNHESRKHFLEGFDFLHYDVKTGDFILHFKMNRNLSFQRGLPGFMPAWDIVFEKNETQFDAKGTPFIAGKRIVPVIENHRFTGRYRDLYPANELIALLEEKGIVFRDGSNILPKLLENDDSHAIDTMVALIRSVLQMRNSNAATGEDYINSPVRDLNGVCFDSRFQNPEWPMDADANGAYHIALKGQLLLNHLKESKDLKLQNGISNQDWLAYIQELRN

SEQ ID NO: 24 - protein, 1307 aa, synthetic construct
MTQFEGFTNLYQVSKTLRFELIPQGKTLKHIQEQGFIEEDKARNDHYKELKPIIDRIYKTYADQCLQLVQLDWENLSAAIDSYRKEKTEETRNALIEEQATYRNAIHDYFIGRTDNLTDAINKRHAEIYKGLFKAELFNGKVLKQLGTVTTTEHENALLRSFDKFTTYFSGFYENRKNVFSAEDISTAIPHRIVQDNFPKFKENCHIFTRLITAVPSLREHFENVKKAIGIFVSTSIEEVFSFPFYNQLLTQTQIDLYNQLLGGISREAGTEKIKGLNEVLNLAIQKNDETAHIIASLPHRFIPLFKQILSDRNTLSFILEEFKSDEEVIQSFCKYKTLLRNENVLETAEALFNELNSIDLTHIFISHKKLETISSALCDHWDTLRNALYERRISELTGKITKSAKEKVQRSLKHEDINLQEIISAAGKELSEAFKQKTSEILSHAHAALDQPLPTTLKKQEEKEILKSQLDSLLGLYHLLDWFAVDESNEVDPEFSARLTGIKLEMEPSLSFYNKARNYATKKPYSVEKFKLNFQMPTLARGWDVNKEKNNGAILFVKNGLYYLGIMPKQKGRYKALSFEPTEKTSEGFDKMYYDYFPDAAKMIPRCSTQLKAVTAHFQTHTTPILLSNNFIEPLEITKEIYDLNNPEKEPKKFQTAYAKKTGDQKGYREALCKWIDFTRDFLSKYTKTTSIDLSSLRPSSQYKDLGEYYAELNPLLYHISFQRIAEKEIMDAVETGKLYLFQIYNKDFAKGHHGKPNLHTLYWTGLFSPENLAKTSIKLNGQAELFYRPKSRMKRMAHRLGEKMLNKKLKDQKTPIPDTLYQELYDYVNHRLSHDLSDEARALLPNVITKEVSHEIIKDRRFTSDKFFFHVPITLNYQAANSPSKFNQRVNAYLKEHPETPIIGIARGERNLIYITVIDSTGKILEQRSLNTIQQFDYQKKLDNREKERVAARQAWSVVGTIKDLKQGYLSQVIHEIVDLMIHYQAVVVLENLNFGFKSKRTGIAEKAVYQQFEKMLIDKLNCLVLKDYPAEKVGGVLNPYQLTDQFTSFAKMGTQSGFLFYVPAPYTSKIDPLTGFVDPFVWKTIKNHESRKHFLEGFDFLHYDVKTGDFILHFKMNRNLSFQRGLPGFMPAWDIVFEKNETQFDAKGTPFIAGKRIVPVIENHRFTGRYRDLYPANELIALLEEKGIVFRDGSNILPKLLENDDSHAIDTMVALIRSVLQMRNSNAATGEDYINSPVRDLNGVCFDSRFQNPEWPMDADANGAYHIALKGQLLLNHLKESKDLKLQNGISNQDWLAYIQELRN

SEQ ID NO: 25 - protein, 986 aa, synthetic construct
MEKRINKIRKKLSADNATKPVSRSGPMKTLLVRVMTDDLKKRLEKRRKKPEVMPQVISNNAANNLRMLLDDYTKMKEAILQVYWQEFKDDHVGLMCKFAQPASKKIDQNKLKPEMDEKGNLTTAGFACSQCGQPLFVYKLEQVSEKGKAYTNYFGRCNVAEHEKLILLAQLKPEKDSDEAVTYSLGKFGQRALDFYSIHVTKESTHPVKPLAQIAGNRYASGPVGKALSDACMGTIASFLSKYQDIIIEHQKVVKGNQKRLESLRELAGKENLEYPSVTLPPQPHTKEGVDAYNEVIARVRMWVNLNLWQKLKLSRDDAKPLLRLKGFPSFPVVERRENEVDWWNTINEVKKLIDAKRDMGRVFWSGVTAEKRNTILEGYNYLPNENDHKKREGSLENPKKPAKRQFGDLLLYLEKKYAGDWGKVFDEAWERIDKKIAGLTSHIEREEARNAEDAQSKAVLTDWLRAKASFVLERLKEMDEKEFYACEIQLQKWYGDLRGNPFAVEAENRVVDISGFSIGSDGHSIQYRNLLAWKYLENGKREFYLLMNYGKKGRIRFTDGTDIKKSGKWQGLLYGGGKAKVIDLTFDPDDEQLIILPLAFGTRQGREFIWNDLLSLETGLIKLANGRVIEKTIYNKKIGRDEPALFVALTFERREVVDPSNIKPVNLIGVARGENIPAVIALTDPEGCPLPEFKDSSGGPTDILRIGEGYKEKQRAIQAAKEVEQRRAGGYSRKFASKSRNLADDMVRNSARDLFYHAVTHDAVLVFANLSRGFGRQGKRTFMTERQYTKMEDWLTAKLAYEGLTSKTYLSKTLAQYTSKTCSNCGFTITTADYDGMLVRLKKTSDGWATTLNNKELKAEGQITYYNRYKRQTVEKELSAELDRLSEESGNNDISKWTKGRRDEALFLLKKRFSHRPVQEQFVCLDCGHEVHAAEQAALNIARSWLFLNSNSTEFKSYKSGKQPFVGAWQAFYKRRLKEVWKPNA

SEQ ID NO: 26 - protein, 757 aa, synthetic construct
MPKPAVESEFSKVLKKHFPGERFRSSYMKRGGKILAAQGEEAVVAYLQGKSEEEPPNFQPPAKCHVVTKSRDFAEWPIMKASEAIQRYIYALSTTERAACKPGKSSESHAAWFAATGVSNHGYSHVQGLNLIFDHTLGRYDGVLKKVQLRNEKARARLESINASRADEGLPEIKAEEEEVATNETGHLLQPPGINPSFYVYQTISPQAYRPRDEIVLPPEYAGYVRDPNAPIPLGVVRNRCDIQKGCPGYIPEWQREAGTAISPKTGKAVTVPGLSPKKNKRMRRYWRSEKEKAQDALLVTVRIGTDWVVIDVRGLLRNARWRTIAPKDISLNALLDLFTGDPVIDVRRNIVTFTYTLDACGTYARKWTLKGKQTKATLDKLTATQTVALVAIALGQTNPISAGISRVTQENGALQCEPLDRFTLPDDLLKDISAYRIAWDRNEEELRARSVEALPEAQQAEVRALDGVSKETARTQLCADFGLDPKRLPWDKMSSNTTFISEALLSNSVSRDQVFFTPAPKKGAKKKAPVEVMRKDRTWARAYKPRLSVEAQKLKNEALWALKRTSPEYLKLSRRKEELCRRSINYVIEKTRRRTQCQIVIPVIEDLNVRFFHGSGKRLPGWDNFFTAKKENRWFIQGLHKAFSDLRTHRSFYVFEVRPERTSITCPKCGHCEVGNRDGEAFQCLSCGKTCNADLDVATHNLTQVALTGKTMPKREEPRDAQGTAPARKTKKASKSKAPPAEREDQTPAQEPSQTS

SEQ ID NO: 27 - protein, 1368 aa, synthetic construct
MDKKYSIGLAIGTNSVGWAVITDEYKVPSKKFKVLGNTDRHSIKKNLIGALLFDSGETAEATRLKRTARRRYTRRKNRICYLQEIFSNEMAKVDDSFFHRLEESFLVEEDKKHERHPIFGNIVDEVAYHEKYPTIYHLRKKLVDSTDKADLRLIYLALAHMIKFRGHFLIEGDLNPDNSDVDKLFIQLVQTYNQLFEENPINASGVDAKAILSARLSKSRRLENLIAQLPGEKKNGLFGNLIALSLGLTPNFKSNFDLAEDAKLQLSKDTYDDDLDNLLAQIGDQYADLFLAAKNLSDAILLSDILRVNTEITKAPLSASMIKRYDEHHQDLTLLKALVRQQLPEKYKEIFFDQSKNGYAGYIDGGASQEEFYKFIKPILEKMDGTEELLVKLNREDLLRKQRTFDNGSIPHQIHLGELHAILRRQEDFYPFLKDNREKIEKILTFRIPYYVGPLARGNSRFAWMTRKSEETITPWNFEEVVDKGASAQSFIERMTNFDKNLPNEKVLPKHSLLYEYFTVYNELTKVKYVTEGMRKPAFLSGEQKKAIVDLLFKTNRKVTVKQLKEDYFKKIECFDSVEISGVEDRFNASLGTYHDLLKIIKDKDFLDNEENEDILEDIVLTLTLFEDREMIEERLKTYAHLFDDKVMKQLKRRRYTGWGRLSRKLINGIRDKQSGKTILDFLKSDGFANRNFMQLIHDDSLTFKEDIQKAQVSGQGDSLHEHIANLAGSPAIKKGILQTVKVVDELVKVMGRHKPENIVIEMARENQTTQKGQKNSRERMKRIEEGIKELGSQILKEHPVENTQLQNEKLYLYYLQNGRDMYVDQELDINRLSDYDVDAIVPQSFLKDDSIDNKVLTRSDKNRGKSDNVPSEEVVKKMKNYWRQLLNAKLITQRKFDNLTKAERGGLSELDKAGFIKRQLVETRQITKHVAQILDSRMNTKYDENDKLIREVKVITLKSKLVSDFRKDFQFYKVREINNYHHAHDAYLNAVVGTALIKKYPKLESEFVYGDYKVYDVRKMIAKSEQEIGKATAKYFFYSNIMNFFKTEITLANGEIRKRPLIETNGETGEIVWDKGRDFATVRKVLSMPQVNIVKKTEVQTGGFSKESILPKRNSDKLIARKKDWDPKKYGGFVSPTVAYSVLVVAKVEKGKSKKLKSVKELLGITIMERSSFEKNPIDFLEAKGYKEVKKDLIIKLPKYSLFELENGRKRMLASARELQKGNELALPSKYVNFLYLASHYEKLKGSPEDNEQKQLFVEQHKHYLDEIIEQISEFSKRVILADANLDKVLSAYNKHRDKPIREQAENIIHLFTLTNLGAPAAFKYFDTTIDRKEYRSTKEVLDATLIHQSITGLYETRIDLSQLGGD

SEQ ID NO: 28 - protein, 1368 aa, synthetic construct
MDKKYSIGLAIGTNSVGWAVITDEYKVPSKKFKVLGNTDRHSIKKNLIGALLFDSGETAEATRLKRTARRRYTRRKNRICYLQEIFSNEMAKVDDSFFHRLEESFLVEEDKKHERHPIFGNIVDEVAYHEKYPTIYHLRKKLVDSTDKADLRLIYLALAHMIKFRGHFLIEGDLNPDNSDVDKLFIQLVQTYNQLFEENPINASGVDAKAILSARLSKSRRLENLIAQLPGEKKNGLFGNLIALSLGLTPNFKSNFDLAEDAKLQLSKDTYDDDLDNLLAQIGDQYADLFLAAKNLSDAILLSDILRVNTEITKAPLSASMIKRYDEHHQDLTLLKALVRQQLPEKYKEIFFDQSKNGYAGYIDGGASQEEFYKFIKPILEKMDGTEELLVKLNREDLLRKQRTFDNGSIPHQIHLGELHAILRRQEDFYPFLKDNREKIEKILTFRIPYYVGPLARGNSRFAWMTRKSEETITPWNFEEVVDKGASAQSFIERMTNFDKNLPNEKVLPKHSLLYEYFTVYNELTKVKYVTEGMRKPAFLSGEQKKAIVDLLFKTNRKVTVKQLKEDYFKKIECFDSVEISGVEDRFNASLGTYHDLLKIIKDKDFLDNEENEDILEDIVLTLTLFEDREMIEERLKTYAHLFDDKVMKQLKRRRYTGWGRLSRKLINGIRDKQSGKTILDFLKSDGFANRNFMQLIHDDSLTFKEDIQKAQVSGQGDSLHEHIANLAGSPAIKKGILQTVKVVDELVKVMGRHKPENIVIEMARENQTTQKGQKNSRERMKRIEEGIKELGSQILKEHPVENTQLQNEKLYLYYLQNGRDMYVDQELDINRLSDYDVDAIVPQSFLKDDSIDNKVLTRSDKNRGKSDNVPSEEVVKKMKNYWRQLLNAKLITQRKFDNLTKAERGGLSELDKAGFIKRQLVETRQITKHVAQILDSRMNTKYDENDKLIREVKVITLKSKLVSDFRKDFQFYKVREINNYHHAHDAYLNAVVGTALIKKYPKLESEFVYGDYKVYDVRKMIAKSEQEIGKATAKYFFYSNIMNFFKTEITLANGEIRKRPLIETNGETGEIVWDKGRDFATVRKVLSMPQVNIVKKTEVQTGGFSKESILPKRNSDKLIARKKDWDPKKYGGFESPTVAYSVLVVAKVEKGKSKKLKSVKELLGITIMERSSFEKNPIDFLEAKGYKEVKKDLIIKLPKYSLFELENGRKRMLASAGELQKGNELALPSKYVNFLYLASHYEKLKGSPEDNEQKQLFVEQHKHYLDEIIEQISEFSKRVILADANLDKVLSAYNKHRDKPIREQAENIIHLFTLTNLGAPAAFKYFDTTIDRKQYRSTKEVLDATLIHQSITGLYETRIDLSQLGGD

SEQ ID NO: 29 - protein, 1368 aa, synthetic construct
MDKKYSIGLAIGTNSVGWAVITDEYKVPSKKFKVLGNTDRHSIKKNLIGALLFDSGETAEATRLKRTARRRYTRRKNRICYLQEIFSNEMAKVDDSFFHRLEESFLVEEDKKHERHPIFGNIVDEVAYHEKYPTIYHLRKKLVDSTDKADLRLIYLALAHMIKFRGHFLIEGDLNPDNSDVDKLFIQLVQTYNQLFEENPINASGVDAKAILSARLSKSRRLENLIAQLPGEKKNGLFGNLIALSLGLTPNFKSNFDLAEDAKLQLSKDTYDDDLDNLLAQIGDQYADLFLAAKNLSDAILLSDILRVNTEITKAPLSASMIKRYDEHHQDLTLLKALVRQQLPEKYKEIFFDQSKNGYAGYIDGGASQEEFYKFIKPILEKMDGTEELLVKLNREDLLRKQRTFDNGSIPHQIHLGELHAILRRQEDFYPFLKDNREKIEKILTFRIPYYVGPLARGNSRFAWMTRKSEETITPWNFEEVVDKGASAQSFIERMTNFDKNLPNEKVLPKHSLLYEYFTVYNELTKVKYVTEGMRKPAFLSGEQKKAIVDLLFKTNRKVTVKQLKEDYFKKIECFDSVEISGVEDRFNASLGTYHDLLKIIKDKDFLDNEENEDILEDIVLTLTLFEDREMIEERLKTYAHLFDDKVMKQLKRRRYTGWGRLSRKLINGIRDKQSGKTILDFLKSDGFANRNFMQLIHDDSLTFKEDIQKAQVSGQGDSLHEHIANLAGSPAIKKGILQTVKVVDELVKVMGRHKPENIVIEMARENQTTQKGQKNSRERMKRIEEGIKELGSQILKEHPVENTQLQNEKLYLYYLQNGRDMYVDQELDINRLSDYDVDAIVPQSFLKDDSIDNKVLTRSDKNRGKSDNVPSEEVVKKMKNYWRQLLNAKLITQRKFDNLTKAERGGLSELDKAGFIKRQLVETRQITKHVAQILDSRMNTKYDENDKLIREVKVITLKSKLVSDFRKDFQFYKVREINNYHHAHDAYLNAVVGTALIKKYPKLESEFVYGDYKVYDVRKMIAKSEQEIGKATAKYFFYSNIMNFFKTEITLANGEIRKRPLIETNGETGEIVWDKGRDFATVRKVLSMPQVNIVKKTEVQTGGFSKESILPKRNSDKLIARKKDWDPKKYGGFVSPTVAYSVLVVAKVEKGKSKKLKSVKELLGITIMERSSFEKNPIDFLEAKGYKEVKKDLIIKLPKYSLFELENGRKRMLASAGELQKGNELALPSKYVNFLYLASHYEKLKGSPEDNEQKQLFVEQHKHYLDEIIEQISEFSKRVILADANLDKVLSAYNKHRDKPIREQAENIIHLFTLTNLGAPAAFKYFDTTIDRKQYRSTKEVLDATLIHQSITGLYETRIDLSQLGGD

SEQ ID NO: 30 - protein, 1368 aa, synthetic construct
MDKKYSIGLAIGTNSVGWAVITDEYKVPSKKFKVLGNTDRHSIKKNLIGALLFDSGETAEATRLKRTARRRYTRRKNRICYLQEIFSNEMAKVDDSFFHRLEESFLVEEDKKHERHPIFGNIVDEVAYHEKYPTIYHLRKKLVDSTDKADLRLIYLALAHMIKFRGHFLIEGDLNPDNSDVDKLFIQLVQTYNQLFEENPINASGVDAKAILSARLSKSRRLENLIAQLPGEKKNGLFGNLIALSLGLTPNFKSNFDLAEDAKLQLSKDTYDDDLDNLLAQIGDQYADLFLAAKNLSDAILLSDILRVNTEITKAPLSASMIKRYDEHHQDLTLLKALVRQQLPEKYKEIFFDQSKNGYAGYIDGGASQEEFYKFIKPILEKMDGTEELLVKLNREDLLRKQRTFDNGSIPHQIHLGELHAILRRQEDFYPFLKDNREKIEKILTFRIPYYVGPLARGNSRFAWMTRKSEETITPWNFEEVVDKGASAQSFIERMTNFDKNLPNEKVLPKHSLLYEYFTVYNELTKVKYVTEGMRKPAFLSGEQKKAIVDLLFKTNRKVTVKQLKEDYFKKIECFDSVEISGVEDRFNASLGTYHDLLKIIKDKDFLDNEENEDILEDIVLTLTLFEDREMIEERLKTYAHLFDDKVMKQLKRRRYTGWGRLSRKLINGIRDKQSGKTILDFLKSDGFANRNFMQLIHDDSLTFKEDIQKAQVSGQGDSLHEHIANLAGSPAIKKGILQTVKVVDELVKVMGRHKPENIVIEMARENQTTQKGQKNSRERMKRIEEGIKELGSQILKEHPVENTQLQNEKLYLYYLQNGRDMYVDQELDINRLSDYDVDAIVPQSFLKDDSIDNKVLTRSDKNRGKSDNVPSEEVVKKMKNYWRQLLNAKLITQRKFDNLTKAERGGLSELDKAGFIKRQLVETRQITKHVAQILDSRMNTKYDENDKLIREVKVITLKSKLVSDFRKDFQFYKVREINNYHHAHDAYLNAVVGTALIKKYPKLESEFVYGDYKVYDVRKMIAKSEQEIGKATAKYFFYSNIMNFFKTEITLANGEIRKRPLIETNGETGEIVWDKGRDFATVRKVLSMPQVNIVKKTEVQTGGFSKESILPKRNSDKLIARKKDWDPKKYGGFLWPTVAYSVLVVAKVEKGKSKKLKSVKELLGITIMERSSFEKNPIDFLEAKGYKEVKKDLIIKLPKYSLFELENGRKRMLASAKQLQKGNELALPSKYVNFLYLASHYEKLKGSPEDNEQKQLFVEQHKHYLDEIIEQISEFSKRVILADANLDKVLSAYNKHRDKPIREQAENIIHLFTLTNLGAPAAFKYFDTTIDRKQYRSTKEVLDATLIHQSITGLYETRIDLSQLGGD

SEQ ID NO: 31 - protein, 1368 aa, synthetic construct
MDKKYSIGLAIGTNSVGWAVITDEYKVPSKKFKVLGNTDRHSIKKNLIGALLFDSGETAERTRLKRTARRRYTRRKNRICYLQEIFSNEMAKVDDSFFHRLEESFLVEEDKKHERHPIFGNIVDEVAYHEKYPTIYHLRKKLVDSTDKADLRLIYLALAHMIKFRGHFLIEGDLNPDNSDVDKLFIQLVQTYNQLFEENPINASGVDAKAILSARLSKSRRLENLIAQLPGEKKNGLFGNLIALSLGLTPNFKSNFDLAEDAKLQLSKDTYDDDLDNLLAQIGDQYADLFLAAKNLSDAILLSDILRVNTEITKAPLSASMIKRYDEHHQDLTLLKALVRQQLPEKYKEIFFDQSKNGYAGYIDGGASQEEFYKFIKPILEKMDGTEELLVKLNREDLLRKQRTFDNGSIPHQIHLGELHAILRRQEDFYPFLKDNREKIEKILTFRIPYYVGPLARGNSRFAWMTRKSEETITPWNFEEVVDKGASAQSFIERMTNFDKNLPNEKVLPKHSLLYEYFTVYNELTKVKYVTEGMRKPAFLSGEQKKAIVDLLFKTNRKVTVKQLKEDYFKKIECFDSVEISGVEDRFNASLGTYHDLLKIIKDKDFLDNEENEDILEDIVLTLTLFEDREMIEERLKTYAHLFDDKVMKQLKRRRYTGWGRLSRKLINGIRDKQSGKTILDFLKSDGFANRNFMQLIHDDSLTFKEDIQKAQVSGQGDSLHEHIANLAGSPAIKKGILQTVKVVDELVKVMGRHKPENIVIEMARENQTTQKGQKNSRERMKRIEEGIKELGSQILKEHPVENTQLQNEKLYLYYLQNGRDMYVDQELDINRLSDYDVDAIVPQSFLKDDSIDNKVLTRSDKNRGKSDNVPSEEVVKKMKNYWRQLLNAKLITQRKFDNLTKAERGGLSELDKAGFIKRQLVETRQITKHVAQILDSRMNTKYDENDKLIREVKVITLKSKLVSDFRKDFQFYKVREINNYHHAHDAYLNAVVGTALIKKYPKLESEFVYGDYKVYDVRKMIAKSEQEIGKATAKYFFYSNIMNFFKTEITLANGEIRKRPLIETNGETGEIVWDKGRDFATVRKVLSMPQVNIVKKTEVQTGGFSKESIRPKRNSDKLIARKKDWDPKKYGGFLWPTVAYSVLVVAKVEKGKSKKLKSVKELLGITIMERSSFEKNPIDFLEAKGYKEVKKDLIIKLPKYSLFELENGRKRMLASAKQLQKGNELALPSKYVNFLYLASHYEKLKGSPEDNEQKQLFVEQHKHYLDEIIEQISEFSKRVILADANLDKVLSAYNKHRDKPIREQAENIIHLFTLTRLGAPRAFKYFDTTIDPKQYRSTKEVLDATLIHQSITGLYETRIDLSQLGGD

SEQ ID NO: 32 - protein, 1053 aa, synthetic construct
MKRNYILGLAIGITSVGYGIIDYETRDVIDAGVRLFKEANVENNEGRRSKRGARRLKRRRRHRIQRVKKLLFDYNLLTDHSELSGINPYEARVKGLSQKLSEEEFSAALLHLAKRRGVHNVNEVEEDTGNELSTKEQISRNSKALEEKYVAELQLERLKKDGEVRGSINRFKTSDYVKEAKQLLKVQKAYHQLDQSFIDTYIDLLETRRTYYEGPGEGSPFGWKDIKEWYEMLMGHCTYFPEELRSVKYAYNADLYNALNDLNNLVITRDENEKLEYYEKFQIIENVFKQKKKPTLKQIAKEILVNEEDIKGYRVTSTGKPEFTNLKVYHDIKDITARKEIIENAELLDQIAKILTIYQSSEDIQEELTNLNSELTQEEIEQISNLKGYTGTHNLSLKAINLILDELWHTNDNQIAIFNRLKLVPKKVDLSQQKEIPTTLVDDFILSPVVKRSFIQSIKVINAIIKKYGLPNDIIIELAREKNSKDAQKMINEMQKRNRQTNERIEEIIRTTGKENAKYLIEKIKLHDMQEGKCLYSLEAIPLEDLLNNPFNYEVDHIIPRSVSFDNSFNNKVLVKQEEASKKGNRTPFQYLSSSDSKISYETFKKHILNLAKGKGRISKTKKEYLLEERDINRFSVQKDFINRNLVDTRYATRGLMNLLRSYFRVNNLDVKVKSINGGFTSFLRRKWKFKKERNKGYKHHAEDALIIANADFIFKEWKKLDKAKKVMENQMFEEKQAESMPEIETEQEYKEIFITPHQIKHIKDFKDYKYSHRVDKKPNRKLINDTLYSTRKDDKGNTLIVNNLNGLYDKDNDKLKKLINKSPEKLLMYHHDPQTYQKLKLIMEQYGDEKNPLYKYYEETGNYLTKYSKKDNGPVIKKIKYYGNKLNAHLDITDDYPNSRNKVVKLSLKPYRFDVYLDNGVYKFVTVKNLDVIKKENYYEVNSKCYEEAKKLKKISNQAEFIASFYKNDLIKINGELYRVIGVNNDLLNRIEVNMIDITYREYLENMNDKRPPHIIKTIASKTQSIKKYSTDILGNLYEVKSKKHPQIIKKG

SEQ ID NO: 33 - protein, 100 aa, synthetic construct
MNNSQGRVTFEDVTVNFTQGEWQRLNPEQRNLYRDVMLENYSNLVSVGQGETTKPDVILRLEQGKEPWLEEEEVLGSGRAEKNGDIGGQIWKPKDVKESL

SEQ ID NO: 34 - protein, 106 aa, synthetic construct
MAATLLMAGSQAPVTFEDMAMYLTREEWRPLDAAQRDLYRDVMQENYGNVVSLDFEIRSENEVNPKQEISEDVQFGTTSERPAENAEENPESEEGFESGDRSERQW

SEQ ID NO: 35 - protein, 95 aa, synthetic construct
MLENYRNLVFLGIAVSKPDLITCLEQGKEPCNMKRHEMVAKPPVMCSHIAEDLCPERDIKYFFQKVILRRYDKCEHENLQLRKGCKSVDECKVCK

SEQ ID NO: 36 - protein, 95 aa, synthetic construct
MGLLTFRDVAIEFSLEEWQCLDTAQRNLYKNVILENYRNLVFLGIAVSKQDLITCLEQEKEPLTVKRHEMVNEPPVMCSHFAQEFWPEQNIKDSF

SEQ ID NO: 37 - protein, 116 aa, synthetic construct
MLQMQNSEHHGQSIKTQTDSISLEDVAVNFTLEEWALLDPGQRNIYRDVMRATFKNLACIGEKWKDQDIEDEHKNQGRNLRSPMVEALCENKEDCPCGKSTSQIPDLNTNLETPTG

SEQ ID NO: 38 - protein, 100 aa, synthetic construct
MALSQGLLTFRDVAIEFSQEEWKCLDPAQRTLYRDVMLENYRNLVSLDISSKCMMNTLSSTGQGNTEVIHTGTLQRQASYHIGAFCSQEIEKDIHDFVFQ

SEQ ID NO: 39 - protein, 98 aa, synthetic construct
MAQGLVTFADVAIDFSQEEWACLNSAQRDLYWDVMLENYSNLVSLDLESAYENKSLPTKKNIHEIRASKRNSDRRSKSLGRNWICEGTLERPQRSRGR

SEQ ID NO: 40 - protein, 118 aa, synthetic construct
MLREEATKKSKEKEPGMALPQGRLTFRDVAIEFSLEEWKCLNPAQRALYRAVMLENYRNLEFVDSSLKSMMEFSSTRHSITGEVIHTGTLQRHKSHHIGDFCFPEMKKDIHHFEFQWQ

SEQ ID NO: 41 - protein, 104 aa, synthetic construct
MPGPPGSLEMGPLTFRDVAIEFSLEEWQCLDTAQRNLYRKVMFENYRNLVFLGIAVSKPHLITCLEQGKEPWNRKRQEMVAKPPVIYSHFTEDLWPEHSIKDSF

SEQ ID NO: 42 - protein, 113 aa, synthetic construct
MSPPWSPALAAEGRGSSCEASVSFEDVTVDFSKEEWQHLDPAQRRLYWDVTLENYSHLLSVGYQIPKSEAAFKLEQGEGPWMLEGEAPHQSCSGEAIGKMQQQGIPGGIFFHC

SEQ ID NO: 43 - protein, 109 aa, synthetic construct
MASPSPPPESKEEWDYLDPAQRSLYKDVMMENYGNLVSLDVLNRDKDEEPTVKQEIEEIEEEVEPQGVIVTRIKSEIDQDPMGRETFELVGRLDKQRGIFLWEIPRESL

SEQ ID NO: 44 - protein, 99 aa, synthetic construct
MALTQGPLKFMDVAIEFSQEEWKCLDPAQRTLYRDVMLENYRNLVSLGICLPDLSVTSMLEQKRDPWTLQSEEKIANDPDGRECIKGVNTERSSKLGSN

SEQ ID NO: 45 - protein, 100 aa, synthetic construct
MAASAQVSVTFEDVAVTFTQEEWGQLDAAQRTLYQEVMLETCGLLMSLGCPLFKPELIYQLDHRQELWMATKDLSQSSYPGDNTKPKTTEPTFSHLALPE

SEQ ID NO: 46 - protein, 144 aa, synthetic construct
MFSQEERMAAGYLPRWSQELVTFEDVSMDFSQEEWELLEPAQKNLYREVMLENYRNVVSLEALKNQCTDVGIKEGPLSPAQTSQVTSLSSWTGYLLFQPVASSHLEQREALWIEEKGTPQASCSDWMTVLRNQDSTYKKVALQE

SEQ ID NO: 47 - protein, 97 aa, synthetic construct
MSQGSVTFRDVAIDFSQEEWKWLQPAQRDLYRCVMLENYGHLVSLGLSISKPDVVSLLEQGKEPWLGKREVKRDLFSVSESSGEIKDFSPKNVIYDD

SEQ ID NO: 48 - protein, 112 aa, synthetic construct
MEEAQKRKAKESGMALPQGRLTFMDVAIEFSQEEWKSLDPGQRALYRDVMLENYRNLVFLGRSCVLGSNAENKPIKNQLGLTLESHLSELQLFQAGRKIYRSNQVEKFTNHR

SEQ ID NO: 49 - protein, 105 aa, synthetic construct
MAAAVLTDRAQVSVTFDDVAVTFTKEEWGQLDLAQRTLYQEVMLENCGLLVSLGCPVPKAELICHLEHGQEPWTRKEDLSQDTCPGDKGKPKTTEPTTCEPALSE

SEQ ID NO: 50 - protein, 99 aa, synthetic construct
MIQAQESITLEDVAVDFTWEEWQLLGAAQKDLYRDVMLENYSNLVAVGYQASKPDALFKLEQGEQLWTIEDGIHSGACSDIWKVDHVLERLQSESLVNR

SEQ ID NO: 51 - protein, 112 aa, synthetic construct
MEGVAGVMSVGPPAARLQEPVTFRDVAVDFTQEEWGQLDPTQRILYRDVMLETFGHLLSIGPELPKPEVISQLEQGTELWVAERGTTQGCHPAWEPRSESQASRKEEGLPEE

SEQ ID NO: 52 - protein, 97 aa, synthetic construct
MSLGSELFRDVAIVFSQEEWQWLAPAQRDLYRDVMLETYSNLVSLGLAVSKPDVISFLEQGKEPWMVERVVSGGLCPVLESRYDTKELFPKQHVYEV

SEQ ID NO: 53 - protein, 105 aa, synthetic construct
MAHKYVGLQYHGSVTFEDVAIAFSQQEWESLDSSQRGLYRDVMLENYRNLVSMAGHSRSKPHVIALLEQWKEPEVTVRKDGRRWCTDLQLEDDTIGCKEMPTSEN

SEQ ID NO: 54 - protein, 92 aa, synthetic construct
MAFEDVAVYFSQEEWGLLDTAQRALYRRVMLDNFALVASLGLSTSRPRVVIQLERGEEPWVPSGTDTTLSRTTYRRRNPGSWSLTEDRDVSG

SEQ ID NO: 55 - protein, 104 aa, synthetic construct
MLENYRNLVFVGIAASKPDLITCLEQGKEPWNVKRHEMVTEPPVVYSYFAQDLWPKQGKKNYFQKVILRTYKKCGRENLQLRKYCKSMDECKVHKECYNGLNQC

SEQ ID NO: 56 - protein, 127 aa, synthetic construct
MHFRRPDPCREPLASPIQDSVAFEDVAVNFTQEEWALLDSSQKNLYREVMQETCRNLASVGSQWKDQNIEDHFEKPGKDIRNHIVQRLCESKEDGQYGEVVSQIPNLDLNENISTGLKPCECSICGK

SEQ ID NO: 57 - protein, 110 aa, synthetic construct
MALSQGLFTFKDVAIEFSQEEWECLDPAQRALYRDVMLENYRNLLSLDEDNIPPEDDISVGFTSKGLSPKENNKEELYHLVILERKESHGINNFDLKEVWENMPKFDSLW

SEQ ID NO: 58 - protein, 98 aa, synthetic construct
MTFEDIIVDFTQEEWALLDTSQRKLFQDVMLENISHLVSIGKQLCKSVVLSQLEQVEKLSTQRISLLQGREVGIKHQEIPFIHHIYQKGTSTISTMRS

SEQ ID NO: 59 - protein, 103 aa, synthetic construct
MAVTFEDVTIIFTWEEWKFLDSSQKRLYREVMWENYTNVMSVENWNESYKSQEEKFRYLEYENFSYWQGWWNAGAQMYENQNYGETVQGTDSKDLTQQDRSQC

SEQ ID NO: 60 - protein, 99 aa, synthetic construct
MITSQGSVSFRDVTVGFTQEEWQHLDPAQRTLYRDVMLENYSHLVSVGYCIPKPEVILKLEKGEEPWILEEKFPSQSHLELINTSRNYSIMKFNEFNKG

SEQ ID NO: 61 - protein, 114 aa, synthetic construct
MFEDVAVYLSREEWGRLGPAQRGLYRDVMLETYGNLVSLGVGPAGPKPGVISQLERGDEPWVLDVQGTSGKEHLRVNSPALGTRTEYKELTSQETFGEEDPQGSEPVEACDHIS

SEQ ID NO: 62 - protein, 112 aa, synthetic construct
METYGNVVSLGLPGSKPDIISQLERGEDPWVLDRKGAKKSQGLWSDYSDNLKYDHTTACTQQDSLSCPWECETKGESQNTDLSPKPLISEQTVILGKTPLGRIDQENNETKQ

SEQ ID NO: 63 - protein, 102 aa, synthetic construct
MAEMNPAQGHVVFEDVAIYFSQEEWGHLDEAQRLLYRDVMLENLALLSSLGCCHGAEDEEAPLEPGVSVGVSQVMAPKPCLSTQNTQPCETCSSLLKDILRL

SEQ ID NO: 64 - protein, 62 aa, synthetic construct
MLDNYRNLVFLGIAVSKPDLITCLEQGKEPCNMKRHAMVAKPPVVCSHFAQDLWPKQGLKDS

SEQ ID NO: 65 - protein, 105 aa, synthetic construct
MAAGQREARPQVSLTFEDVAVLFTRDEWRKLAPSQRNLYRDVMLENYRNLVSLGLPFTKPKVISLLQQGEDPWEVEKDGSGVSSLGSKSSHKTTKSTQTQDSSFQ

SEQ ID NO: 66 - protein, 97 aa, synthetic construct
MALRSVMFSDVSIDFSPEEWEYLDLEQKDLYRDVMLENYSNLVSLGCFISKPDVISSLEQGKEPWKVVRKGRRQYPDLETKYETKKLSLENDIYEIN

SEQ ID NO: 67 - protein, 98 aa, synthetic construct
MTTFKEAMTFKDVAVVFTEEELGLLDLAQRKLYRDVMLENFRNLLSVGHQAFHRDTFHFLREEKIWMMKTAIQREGNSGDKIQTEMETVSEAGTHQEW

SEQ ID NO: 68 - protein, 103 aa, synthetic construct
MFQVEQKSQESVSFKDVTVGFTQEEWQHLDPSQRALYRDVMLENYSNLVSVGYCVHKPEVIFRLQQGEEPWKQEEEFPSQSFPEVWTADHLKERSQENQSKHL

SEQ ID NO: 69 - protein, 98 aa, synthetic construct
MTKSKEAVTFKDVAVVFSEEELQLLDLAQRKLYRDVMLENFRNVVSVGHQSTPDGLPQLEREEKLWMMKMATQRDNSSGAKNLKEMETLQEVGLRYLP

SEQ ID NO: 70 - protein, 112 aa, synthetic construct
MSQKPQVLGPEKQDGSCEASVSFEDVTVDFSREEWQQLDPAQRCLYRDVMLELYSHLFAVGYHIPNPEVIFRMLKEKEPRVEEAEVSHQRCQEREFGLEIPQKEISKKASFQ

SEQ ID NO: 71 - protein, 95 aa, synthetic construct
MELVTFRDVAIEFSPEEWKCLDPAQQNLYRDVMLENYRNLVSLGFVISNPDLVTCLEQIKEPCNLKIHETAAKPPAICSPFSQDLSPVQGIEDSF

SEQ ID NO: 72 - protein, 112 aa, synthetic construct
MSTLLQGGHNLLSSASFQESVTFKDVIVDFTQEEWKQLDPGQRDLFRDVTLENYTHLVSIGLQVSKPDVISQLEQGTEPWIMEPSIPVGTCADWETRLENSVSAPEPDISEE

SEQ ID NO: 73 - protein, 112 aa, synthetic construct
MDPAQVPVAADLLTDHEEGYVTFEDVAVYFSQEEWRLLDDAQRLLYRNVMLENFTLLASLGLASSKTHEITQLESWEEPFMPAWEVVTSAIPRGCWHGAEAEEAPEQIASVG

SEQ ID NO: 74 - protein, 112 aa, synthetic construct
MKKLEAVGTGIEPKAMSQGLVTFGDVAVDFSQEEWEWLNPIQRNLYRKVMLENYRNLASLGLCVSKPDVISSLEQGKEPWTVKRKMTRAWCPDLKAVWKIKELPLKKDFCEG

SEQ ID NO: 75 - protein, 108 aa, synthetic construct
MSLLGEHWDYDALFETQPGLVTIKNLAVDFRQQLHPAQKNFCKNGIWENNSDLGSAGHCVAKPDLVSLLEQEKEPWMVKRELTGSLFSGQRSVHETQELFPKQDSYAE

SEQ ID NO: 76 - protein, 113 aa, synthetic construct
MLALAASQPARLEERLIRDRDLGASLLPAAPQEQWRQLDSTQKEQYWDLILETYGKMVSGAGISHPKSDLTNSIEFGEELAGIYLHVNEKIPRPTCIGDRQENDKENLNLENH

SEQ ID NO: 77 - protein, 131 aa, synthetic construct
MEGRPGETTDTCFVSGVHGPVALGDIPFYFSREEWGTLDPAQRDLFWDIKRENSRNTTLGFGLKGQSEKSLLQEMVPVVPGQTGSDVTVSWSPEEAEAWESENRPRAALGPVVGARRGRPPTRRRQFRDLA

SEQ ID NO: 78 - protein, 116 aa, synthetic construct
MVAVVRALQRALDGTSSQGMVTFEDTAVSLTWEEWERLDPARRDFCRESAQKDSGSTVPPSLESRVENKELIPMQQILEEAEPQGQLQEAFQGKRPLFSKCGSTHEDRVEKQSGDP

SEQ ID NO: 79 - protein, 113 aa, synthetic construct
MNKSQGSVSFTDVTVDFTQEEWEQLDPSQRILYMDVMLENYSNLLSVEVWKADDQMERDHRNPDEQARQFLILKNQTPIEERGDLFGKALNLNTDFVSLRQVPYKYDLYEKTL

SEQ ID NO: 80 - protein, 108 aa, synthetic construct
MAHGSVTFRDVAIDFSQEEWEFLDPAQRDLYRDVMWENYSNFISLGPSISKPDVITLLDEERKEPGMVVREGTRRYCPDLESRYRTNTLSPEKDIYEIYSFQWDIMER

SEQ ID NO: 81 - protein, 141 aa, synthetic construct
MAAAVLRDSTSVPVTAEAKLMGFTQGCVTFEDVAIYFSQEEWGLLDEAQRLLYRDVMLENFALITALVCWHGMEDEETPEQSVSVEGVPQVRTPEASPSTQKIQSCDMCVPFLTDILHLTDLPGQELYLTGACAVFHQDQK

SEQ ID NO: 82 - protein, 133 aa, synthetic construct
MLPPTAASQREGHTEGGELVNELLKSWLKGLVTFEDVAVEFTQEEWALLDPAQRTLYRDVMLENCRNLASLGNQVDKPRLISQLEQEDKVMTEERGILSGTCPDVENPFKAKGLTPKLHVFRKEQSRNMKMER

SEQ ID NO: 83 - protein, 107 aa, synthetic construct
MAQESVMFSDVSVDFSQEEWECLNDDQRDLYRDVMLENYSNLVSMGHSISKPNVISYLEQGKEPWLADRELTRGQWPVLESRCETKKLFLKKEIYEIESTQWEIMEK

SEQ ID NO: 84 - protein, 114 aa, synthetic construct
MPGAPGSLEMGPLTFRDVTIEFSLEEWQCLDTVQQNLYRDVMLENYRNLVFLGMAVFKPDLITCLKQGKEPWNMKRHEMVTKPPVMRSHFTQDLWPDQSTKDSFQEVILRTYAR

SEQ ID NO: 85 - protein, 95 aa, synthetic construct
MAGSQFPDFKHLGTFLVFEELVTFEDVLVDFSPEELSSLSAAQRNLYREVMLENYRNLVSLGHQFSKPDIISRLEEEESYAMETDSRHTVICQGE

SEQ ID NO: 86 - protein, 78 aa, synthetic construct
MPGPPRSLEMGLLTFRDVAIEFSLEEWQHLDIAQQNLYRNVMLENYRNLAFLGIAVSKPDLITCLEQGKEPWNMKRHE

SEQ ID NO: 87 - protein, 93 aa, synthetic construct
MAPPLAPLPPRDPNGAGPEWREPGAVSFADVAVYFCREEWGCLRPAQRALYRDVMRETYGHLSALGIGGNKPALISWVEEEAELWGPAAQDPE

SEQ ID NO: 88 - protein, 100 aa, synthetic construct
MGPPLAPRPAHVPGEAGPRRTRESRPGAVSFADVAVYFSPEEWECLRPAQRALYRDVMRETFGHLGALGFSVPKPAFISWVEGEVEAWSPEAQDPDGESS

SEQ ID NO: 89 - protein, 573 aa, synthetic construct
MDAKSLTAWSRTLVTFKDVFVDFTREEWKLLDTAQQIVYRNVMLENYKNLVSLGYQLTKPDVILRLEKGEEPWLVEREIHQETHPDSETAFEIKSSVSSRSIFKDKQSCDIKMEGMARNDLWYLSLEEVWKCRDQLDKYQENPERHLRQVAFTQKKVLTQERVSESGKYGGNCLLPAQLVLREYFHKRDSHTKSLKHDLVLNGHQDSCASNSNECGQTFCQNIHLIQFARTHTGDKSYKCPDNDNSLTHGSSLGISKGIHREKPYECKECGKFFSWRSNLTRHQLIHTGEKPYECKECGKSFSRSSHLIGHQKTHTGEEPYECKECGKSFSWFSHLVTHQRTHTGDKLYTCNQCGKSFVHSSRLIRHQRTHTGEKPYECPECGKSFRQSTHLILHQRTHVRVRPYECNECGKSYSQRSHLVVHHRIHTGLKPFECKDCGKCFSRSSHLYSHQRTHTGEKPYECHDCGKSFSQSSALIVHQRIHTGEKPYECCQCGKAFIRKNDLIKHQRIHVGEETYKCNQCGIIFSQNSPFIVHQIAHTGEQFLTCNQCGTALVNTSNLIGYQTNHIRENAY

SEQ ID NO: 90 - protein, 191 aa, synthetic construct
MGKKTKRTADSSSSEDEEEYVVEKVLDRRVVKGQVEYLLKWKGFSEEHNTWEPEKNLDCPELISEFMKKYKKMKEGENNKPREKSESNKRKSNFSNSADDIKSKKKREQSNDIARGFERGLEPEKIIGATDSCGDLMFLMKWKDTDEADLVLAKEANVKCPQIVIAFYEERLTWHAYPEDAENKEKETAKS

SEQ ID NO: 91 - protein, 228 aa, synthetic construct
MTMGDKKSPTRPKRQAKPAADEGFWDCSVCTFRNSAEAFKCSICDVRKGTSTRKPRINSQLVAQQVAQQYATPPPPKKEKKEKVEKQDKEKPEKDKEISPSVTKKNTNKKTKPKSDILKDPPSEANSIQSANATTKTSETNHTSRPRLKNVDRSTAQQLAVTVGNVTVIITDFKEKTRSSSTSSSTVTSSAGSEQQNQSSSGSESTDKGSSRSSTPKGDMSAVNDESF

SEQ ID NO: 92 - protein, 180 aa, synthetic construct
MGDKKSPTRPKRQPKPSSDEGYWDCSVCTFRNSAEAFKCMMCDVRKGTSTRKPRPVSQLVAQQVTQQFVPPTQSKKEKKDKVEKEKSEKETTSKKNSHKKTRPRLKNVDRSSAQHLEVTVGDLTVIITDFKEKTKSPPASSAASADQHSQSGSSSDNTERGMSRSSSPRGEASSLNGESH

SEQ ID NO: 93 - protein, 3065 aa, synthetic construct
MEEKQQIILANQDGGTVAGAAPTFFVILKQPGNGKTDQGILVTNQDACALASSVSSPVKSKGKICLPADCTVGGITVTLDNNSMWNEFYHRSTEMILTKQGRRMFPYCRYWITGLDSNLKYILVMDISPVDNHRYKWNGRWWEPSGKAEPHVLGRVFIHPESPSTGHYWMHQPVSFYKLKLTNNTLDQEGHIILHSMHRYLPRLHLVPAEKAVEVIQLNGPGVHTFTFPQTEFFAVTAYQNIQITQLKIDYNPFAKGFRDDGLNNKPQRDGKQKNSSDQEGNNISSSSGHRVRLTEGQGSEIQPGDLDPLSRGHETSGKGLEKTSLNIKRDFLGFMDTDSALSEVPQLKQEISECLIASSFEDDSRVASPLDQNGSFNVVIKEEPLDDYDYELGECPEGVTVKQEETDEETDVYSNSDDDPILEKQLKRHNKVDNPEADHLSSKWLPSSPSGVAKAKMFKLDTGKMPVVYLEPCAVTRSTVKISELPDNMLSTSRKDKSSMLAELEYLPTYIENSNETAFCLGKESENGLRKHSPDLRVVQKYPLLKEPQWKYPDISDSISTERILDDSKDSVGDSLSGKEDLGRKRTTMLKIATAAKVVNANQNASPNVPGKRGRPRKLKLCKAGRPPKNTGKSLISTKNTPVSPGSTFPDVKPDLEDVDGVLFVSFESKEALDIHAVDGTTEESSSLQASTTNDSGYRARISQLEKELIEDLKTLRHKQVIHPGLQEVGLKLNSVDPTMSIDLKYLGVQLPLAPATSFPFWNLTGTNPASPDAGFPFVSRTGKTNDFTKIKGWRGKFHSASASRNEGGNSESSLKNRSAFCSDKLDEYLENEGKLMETSMGFSSNAPTSPVVYQLPTKSTSYVRTLDSVLKKQSTISPSTSYSLKPHSVPPVSRKAKSQNRQATFSGRTKSSYKSILPYPVSPKQKYSHVILGDKVTKNSSGIISENQANNFVVPTLDENIFPKQISLRQAQQQQQQQQGSRPPGLSKSQVKLMDLEDCALWEGKPRTYITEERADVSLTTLLTAQASLKTKPIHTIIRKRAPPCNNDFCRLGCVCSSLALEKRQPAHCRRPDCMFGCTCLKRKVVLVKGGSKTKHFQRKAAHRDPVFYDTLGEEAREEEEGIREEEEQLKEKKKRKKLEYTICETEPEQPVRHYPLWVKVEGEVDPEPVYIPTPSVIEPMKPLLLPQPEVLSPTVKGKLLTGIKSPRSYTPKPNPVIREEDKDPVYLYFESMMTCARVRVYERKKEDQRQPSSSSSPSPSFQQQTSCHSSPENHNNAKEPDSEQQPLKQLTCDLEDDSDKLQEKSWKSSCNEGESSSTSYMHQRSPGGPTKLIEIISDCNWEEDRNKILSILSQHINSNMPQSLKVGSFIIELASQRKSRGEKNPPVYSSRVKISMPSCQDQDDMAEKSGSETPDGPLSPGKMEDISPVQTDALDSVRERLHGGKGLPFYAGLSPAGKLVAYKRKPSSSTSGLIQVASNAKVAASRKPRTLLPSTSNSKMASSSGTATNRPGKNLKAFVPAKRPIAARPSPGGVFTQFVMSKVGALQQKIPGVSTPQTLAGTQKFSIRPSPVMVVTPVVSSEPVQVCSPVTAAVTTTTPQVFLENTTAVTPMTAISDVETKETTYSSGATTTGVVEVSETNTSTSVTSTQSTATVNLTKTTGITTPVASVAFPKSLVASPSTITLPVASTASTSLVVVTAAASSSMVTTPTSSLGSVPIILSGINGSPPVSQRPENAAQIPVATPQVSPNTVKRAGPRLLLIPVQQGSPTLRPVSNTQLQGHRMVLQPVRSPSGMNLFRHPNGQIVQLLPLHQLRGSNTQPNLQPVMFRNPGSVMGIRLPAPSKPSETPPSSTSSSAFSVMNPVIQAVGSSSAVNVITQAPSLLSSGASFVSQAGTLTLRISPPEPQSFASKTGSETKITYSSGGQPVGTASLIPLQSGSFALLQLPGQKPVPSSILQHVASLQMKRESQNPDQKDETNSIKREQETKKVLQSEGEAVDPEANVIKQNSGAATSEETLNDSLEDRGDHLDEECLPEEGCATVKPSEHSCITGSHTDQDYKDVNEEYGARNRKSSKEKVAVLEVRTISEKASNKTVQNLSKVQHQKLGDVKVEQQKGFDNPEENSSEFPVTFKEESKFELSGSKVMEQQSNLQPEAKEKECGDSLEKDRERWRKHLKGPLTRKCVGASQECKKEADEQLIKETKTCQENSDVFQQEQGISDLLGKSGITEDARVLKTECDSWSRISNPSAFSIVPRRAAKSSRGNGHFQGHLLLPGEQIQPKQEKKGGRSSADFTVLDLEEDDEDDNEKTDDSIDEIVDVVSDYQSEEVDDVEKNNCVEYIEDDEEHVDIETVEELSEEINVAHLKTTAAHTQSFKQPSCTHISADEKAAERSRKAPPIPLKLKPDYWSDKLQKEAEAFAYYRRTHTANERRRRGEMRDLFEKLKITLGLLHSSKVSKSLILTRAFSEIQGLTDQADKLIGQKNLLTRKRNILIRKVSSLSGKTEEVVLKKLEYIYAKQQALEAQKRKKKMGSDEFDISPRISKQQEGSSASSVDLGQMFINNRRGKPLILSRKKDQATENTSPLNTPHTSANLVMTPQGQLLTLKGPLFSGPVVAVSPDLLESDLKPQVAGSAVALPENDDLFMMPRIVNVTSLATEGGLVDMGGSKYPHEVPDSKPSDHLKDTVRNEDNSLEDKGRISSRGNRDGRVTLGPTQVFLANKDSGYPQIVDVSNMQKAQEFLPKKISGDMRGIQYKWKESESRGERVKSKDSSFHKLKMKDLKDSSIEMELRKVTSAIEEAALDSSELLTNMEDEDDTDETLTSLLNEIAFLNQQLNDDSVGLAELPSSMDTEFPGDARRAFISKVPPGSRATFQVEHLGTGLKELPDVQGESDSISPLLLHLEDDDFSENEKQLAEPASEPDVLKIVIDSEIKDSLLSNKKAIDGGKNTSGLPAEPESVSSPPTLHMKTGLENSNSTDTLWRPMPKLAPLGLKVANPSSDADGQSLKVMPCLAPIAAKVGSVGHKMNLTGNDQEGRESKVMPTLAPVVAKLGNSGASPSSAGK

SEQ ID NO: 94 - protein, 185 aa, synthetic construct
MGKKQNKKKVEEVLEEEEEEYVVEKVLDRRVVKGKVEYLLKWKGFSDEDNTWEPEENLDCPDLIAEFLQSQKTAHETDKSEGGKRKADSDSEDKGEESKPKKKKEESEKPRGFARGLEPERIIGATDSSGELMFLMKWKNSDEADLVPAKEANVKCPQVVISFYEERLTWHSYPSEDDDKKDDKN

SEQ ID NO: 95 - protein, 660 aa, synthetic construct
MLVCYSVLACEILWDLPCSIMGSPLGHFTWDKYLKETCSVPAPVHCFKQSYTPPSNEFKISMKLEAQDPRNTTSTCIATVVGLTGARLRLRLDGSDNKNDFWRLVDSAEIQPIGNCEKNGGMLQPPLGFRLNASSWPMFLLKTLNGAEMAPIRIFHKEPPSPSHNFFKMGMKLEAVDRKNPHFICPATIGEVRGSEVLVTFDGWRGAFDYWCRFDSRDIFPVGWCSLTGDNLQPPGTKVVIPKNPYPASDVNTEKPSIHSSTKTVLEHQPGQRGRKPGKKRGRTPKTLISHPISAPSKTAEPLKFPKKRGPKPGSKRKPRTLLNPPPASPTTSTPEPDTSTVPQDAATIPSSAMQAPTVCIYLNKNGSTGPHLDKKKVQQLPDHFGPARASVVLQQAVQACIDCAYHQKTVFSFLKQGHGGEVISAVFDREQHTLNLPAVNSITYVLRFLEKLCHNLRSDNLFGNQPFTQTHLSLTAIEYSHSHDRYLPGETFVLGNSLARSLEPHSDSMDSASNPTNLVSTSQRHRPLLSSCGLPPSTASAVRRLCSRGVLKGSNERRDMESFWKLNRSPGSDRYLESRDASRLSGRDPSSWTVEDVMQFVREADPQLGPHADLFRKHEIDGKALLLLRSDMMMKYMGLKLGPALKLSYHIDRLKQGKF

SEQ ID NO: 96 - protein, 860 aa, synthetic construct
MEQVAEGARVTAVPVSAADSTEELAEVEEGVGVVGEDNDAAARGAEAFGDSEEDGEDVFEVEKILDMKTEGGKVLYKVRWKGYTSDDDTWEPEIHLEDCKEVLLEFRKKIAENKAKAVRKDIQRLSLNNDIFEANSDSDQQSETKEDTSPKKKKKKLRQREEKSPDDLKKKKAKAGKLKDKSKPDLESSLESLVFDLRTKKRISEAKEELKESKKPKKDEVKETKELKKVKKGEIRDLKTKTREDPKENRKTKKEKFVESQVESESSVLNDSPFPEDDSEGLHSDSREEKQNTKSARERAGQDMGLEHGFEKPLDSAMSAEEDTDVRGRRKKKTPRKAEDTRENRKLENKNAFLEKKTVPKKQRNQDRSKSAAELEKLMPVSAQTPKGRRLSGEERGLWSTDSAEEDKETKRNESKEKYQKRHDSDKEEKGRKEPKGLKTLKEIRNAFDLFKLTPEEKNDVSENNRKREEIPLDFKTIDDHKTKENKQSLKERRNTRDETDTWAYIAAEGDQEVLDSVCQADENSDGRQQILSLGMDLQLEWMKLEDFQKHLDGKDENFAATDAIPSNVLRDAVKNGDYITVKVALNSNEEYNLDQEDSSGMTLVMLAAAGGQDDLLRLLITKGAKVNGRQKNGTTALIHAAEKNFLTTVAILLEAGAFVNVQQSNGETALMKACKRGNSDIVRLVIECGADCNILSKHQNSALHFAKQSNNVLVYDLLKNHLETLSRVAEETIKDYFEARLALLEPVFPIACHRLCEGPDFSTDFNYKPPQNIPEGSGILLFIFHANFLGKEVIARLCGPCSVQAVVLNDKFQLPVFLDSHFVYSFSPVAGPNKLFIRLTEAPSAKVKLLIGAYRVQLQ

SEQ ID NO: 97 - protein, 103 aa, synthetic construct
MSEEKPKEGVKTENDHINLKVAGQDGSVVQFKIKRHTPLSKLMKAYCERQGLSMRQIRFRFDGQPINETDTPAQLEMEDEDTIDVFQQQTGGVPESSLAGHSF

SEQ ID NO: 98 - protein, 4834 aa, synthetic construct
MPSESFCLAAQARLDSKWLKTDIQLAFTRDGLCGLWNEMVKDGEIVYTGTESTQNGELPPRKDDSVEPSGTKKEDLNDKEKKDEEETPAPIYRAKSILDSWVWGKQPDVNELKECLSVLVKEQQALAVQSATTTLSALRLKQRLVILERYFIALNRTVFQENVKVKWKSSGISLPPVDKKSSRPAGKGVEGLARVGSRAALSFAFAFLRRAWRSGEDADLCSELLQESLDALRALPEASLFDESTVSSVWLEVVERATRFLRSVVTGDVHGTPATKGPGSIPLQDQHLALAILLELAVQRGTLSQMLSAILLLLQLWDSGAQETDNERSAQGTSAPLLPLLQRFQSIICRKDAPHSEGDMHLLSGPLSPNESFLRYLTLPQDNELAIDLRQTAVVVMAHLDRLATPCMPPLCSSPTSHKGSLQEVIGWGLIGWKYYANVIGPIQCEGLANLGVTQIACAEKRFLILSRNGRVYTQAYNSDTLAPQLVQGLASRNIVKIAAHSDGHHYLALAATGEVYSWGCGDGGRLGHGDTVPLEEPKVISAFSGKQAGKHVVHIACGSTYSAAITAEGELYTWGRGNYGRLGHGSSEDEAIPMLVAGLKGLKVIDVACGSGDAQTLAVTENGQVWSWGDGDYGKLGRGGSDGCKTPKLIEKLQDLDVVKVRCGSQFSIALTKDGQVYSWGKGDNQRLGHGTEEHVRYPKLLEGLQGKKVIDVAAGSTHCLALTEDSEVHSWGSNDQCQHFDTLRVTKPEPAALPGLDTKHIVGIACGPAQSFAWSSCSEWSIGLRVPFVVDICSMTFEQLDLLLRQVSEGMDGSADWPPPQEKECVAVATLNLLRLQLHAAISHQVDPEFLGLGLGSILLNSLKQTVVTLASSAGVLSTVQSAAQAVLQSGWSVLLPTAEERARALSALLPCAVSGNEVNISPGRRFMIDLLVGSLMADGGLESALHAAITAEIQDIEAKKEAQKEKEIDEQEANASTFHRSRTPLDKDLINTGICESSGKQCLPLVQLIQQLLRNIASQTVARLKDVARRISSCLDFEQHSRERSASLDLLLRFQRLLISKLYPGESIGQTSDISSPELMGVGSLLKKYTALLCTHIGDILPVAASIASTSWRHFAEVAYIVEGDFTGVLLPELVVSIVLLLSKNAGLMQEAGAVPLLGGLLEHLDRFNHLAPGKERDDHEELAWPGIMESFFTGQNCRNNEEVTLIRKADLENHNKDGGFWTVIDGKVYDIKDFQTQSLTGNSILAQFAGEDPVVALEAALQFEDTRESMHAFCVGQYLEPDQEIVTIPDLGSLSSPLIDTERNLGLLLGLHASYLAMSTPLSPVEIECAKWLQSSIFSGGLQTSQIHYSYNEEKDEDHCSSPGGTPASKSRLCSHRRALGDHSQAFLQAIADNNIQDHNVKDFLCQIERYCRQCHLTTPIMFPPEHPVEEVGRLLLCCLLKHEDLGHVALSLVHAGALGIEQVKHRTLPKSVVDVCRVVYQAKCSLIKTHQEQGRSYKEVCAPVIERLRFLFNELRPAVCNDLSIMSKFKLLSSLPRWRRIAQKIIRERRKKRVPKKPESTDDEEKIGNEESDLEEACILPHSPINVDKRPIAIKSPKDKWQPLLSTVTGVHKYKWLKQNVQGLYPQSPLLSTIAEFALKEEPVDVEKMRKCLLKQLERAEVRLEGIDTILKLASKNFLLPSVQYAMFCGWQRLIPEGIDIGEPLTDCLKDVDLIPPFNRMLLEVTFGKLYAWAVQNIRNVLMDASAKFKELGIQPVPLQTITNENPSGPSLGTIPQARFLLVMLSMLTLQHGANNLDLLLNSGMLALTQTALRLIGPSCDNVEEDMNASAQGASATVLEETRKETAPVQLPVSGPELAAMMKIGTRVMRGVDWKWGDQDGPPPGLGRVIGELGEDGWIRVQWDTGSTNSYRMGKEGKYDLKLAELPAAAQPSAEDSDTEDDSEAEQTERNIHPTAMMFTSTINLLQTLCLSAGVHAEIMQSEATKTLCGLLRMLVESGTTDKTSSPNRLVYREQHRSWCTLGFVRSIALTPQVCGALSSPQWITLLMKVVEGHAPFTATSLQRQILAVHLLQAVLPSWDKTERARDMKCLVEKLFDFLGSLLTTCSSDVPLLRESTLRRRRVRPQASLTATHSSTLAEEVVALLRTLHSLTQWNGLINKYINSQLRSITHSFVGRPSEGAQLEDYFPDSENPEVGGLMAVLAVIGGIDGRLRLGGQVMHDEFGEGTVTRITPKGKITVQFSDMRTCRVCPLNQLKPLPAVAFNVNNLPFTEPMLSVWAQLVNLAGSKLEKHKIKKSTKQAFAGQVDLDLLRCQQLKLYILKAGRALLSHQDKLRQILSQPAVQETGTVHTDDGAVVSPDLGDMSPEGPQPPMILLQQLLASATQPSPVKAIFDKQELEAAALAVCQCLAVESTHPSSPGFEDCSSSEATTPVAVQHIRPARVKRRKQSPVPALPIVVQLMEMGFSRRNIEFALKSLTGASGNASSLPGVEALVGWLLDHSDIQVTELSDADTVSDEYSDEEVVEDVDDAAYSMSTGAVVTESQTYKKRADFLSNDDYAVYVRENIQVGMMVRCCRAYEEVCEGDVGKVIKLDRDGLHDLNVQCDWQQKGGTYWVRYIHVELIGYPPPSSSSHIKIGDKVRVKASVTTPKYKWGSVTHQSVGVVKAFSANGKDIIVDFPQQSHWTGLLSEMELVPSIHPGVTCDGCQMFPINGSRFKCRNCDDFDFCETCFKTKKHNTRHTFGRINEPGQSAVFCGRSGKQLKRCHSSQPGMLLDSWSRMVKSLNVSSSVNQASRLIDGSEPCWQSSGSQGKHWIRLEIFPDVLVHRLKMIVDPADSSYMPSLVVVSGGNSLNNLIELKTININPSDTTVPLLNDCTEYHRYIEIAIKQCRSSGIDCKIHGLILLGRIRAEEEDLAAVPFLASDNEEEEDEKGNSGSLIRKKAAGLESAATIRTKVFVWGLNDKDQLGGLKGSKIKVPSFSETLSALNVVQVAGGSKSLFAVTVEGKVYACGEATNGRLGLGISSGTVPIPRQITALSSYVVKKVAVHSGGRHATALTVDGKVFSWGEGDDGKLGHFSRMNCDKPRLIEALKTKRIRDIACGSSHSAALTSSGELYTWGLGEYGRLGHGDNTTQLKPKMVKVLLGHRVIQVACGSRDAQTLALTDEGLVFSWGDGDFGKLGRGGSEGCNIPQNIERLNGQGVCQIECGAQFSLALTKSGVVWTWGKGDYFRLGHGSDVHVRKPQVVEGLRGKKIVHVAVGALHCLAVTDSGQVYAWGDNDHGQQGNGTTTVNRKPTLVQGLEGQKITRVACGSSHSVAWTTVDVATPSVHEPVLFQTARDPLGASYLGVPSDADSSAASNKISGASNSKPNRPSLAKILLSLDGNLAKQQALSHILTALQIMYARDAVVGALMPAAMIAPVECPSFSSAAPSDASAMASPMNGEECMLAVDIEDRLSPNPWQEKREIVSSEDAVTPSAVTPSAPSASARPFIPVTDDLGAASIIAETMTKTKEDVESQNKAAGPEPQALDEFTSLLIADDTRVVVDLLKLSVCSRAGDRGRDVLSAVLSGMGTAYPQVADMLLELCVTELEDVATDSQSGRLSSQPVVVESSHPYTDDTSTSGTVKIPGAEGLRVEFDRQCSTERRHDPLTVMDGVNRIVSVRSGREWSDWSSELRIPGDELKWKFISDGSVNGWGWRFTVYPIMPAAGPKELLSDRCVLSCPSMDLVTCLLDFRLNLASNRSIVPRLAASLAACAQLSALAASHRMWALQRLRKLLTTEFGQSININRLLGENDGETRALSFTGSALAALVKGLPEALQRQFEYEDPIVRGGKQLLHSPFFKVLVALACDLELDTLPCCAETHKWAWFRRYCMASRVAVALDKRTPLPRLFLDEVAKKIRELMADSENMDVLHESHDIFKREQDEQLVQWMNRRPDDWTLSAGGSGTIYGWGHNHRGQLGGIEGAKVKVPTPCEALATLRPVQLIGGEQTLFAVTADGKLYATGYGAGGRLGIGGTESVSTPTLLESIQHVFIKKVAVNSGGKHCLALSSEGEVYSWGEAEDGKLGHGNRSPCDRPRVIESLRGIEVVDVAAGGAHSACVTAAGDLYTWGKGRYGRLGHSDSEDQLKPKLVEALQGHRVVDIACGSGDAQTLCLTDDDTVWSWGDGDYGKLGRGGSDGCKVPMKIDSLTGLGVVKVECGSQFSVALTKSGAVYTWGKGDYHRLGHGSDDHVRRPRQVQGLQGKKVIAIATGSLHCVCCTEDGEVYTWGDNDEGQLGDGTTNAIQRPRLVAALQGKKVNRVACGSAHTLAWSTSKPASAGKLPAQVPMEYNHLQEIPIIALRNRLLLLHHLSELFCPCIPMFDLEGSLDETGLGPSVGFDTLRGILISQGKEAAFRKVVQATMVRDRQHGPVVELNRIQVKRSRSKGGLAGPDGTKSVFGQMCAKMSSFGPDSLLLPHRVWKVKFVGESVDDCGGGYSESIAEICEELQNGLTPLLIVTPNGRDESGANRDCYLLSPAARAPVHSSMFRFLGVLLGIAIRTGSPLSLNLAEPVWKQLAGMSLTIADLSEVDKDFIPGLMYIRDNEATSEEFEAMSLPFTVPSASGQDIQLSSKHTHITLDNRAEYVRLAINYRLHEFDEQVAAVREGMARVVPVPLLSLFTGYELETMVCGSPDIPLHLLKSVATYKGIEPSASLIQWFWEVMESFSNTERSLFLRFVWGRTRLPRTIADFRGRDFVIQVLDKYNPPDHFLPESYTCFFLLKLPRYSCKQVLEEKLKYAIHFCKSIDTDDYARIALTGEPAADDSSDDSDNEDVDSFASDSTQDYLTGH

SEQ ID NO: 99 - protein, 593 aa, synthetic construct
MAEMGSKGVTAGKIASNVQKKLTRAQEKVLQKLGKADETKDEQFEQCVQNFNKQLTEGTRLQKDLRTYLASVKAMHEASKKLNECLQEVYEPDWPGRDEANKIAENNDLLWMDYHQKLVDQALLTMDTYLGQFPDIKSRIAKRGRKLVDYDSARHHYESLQTAKKKDEAKIAKPVSLLEKAAPQWCQGKLQAHLVAQTNLLRNQAEEELIKAQKVFEEMNVDLQEELPSLWNSRVGFYVNTFQSIAGLEENFHKEMSKLNQNLNDVLVGLEKQHGSNTFTVKAQPSDNAPAKGNKSPSPPDGSPAATPEIRVNHEPEPAGGATPGATLPKSPSQLRKGPPVPPPPKHTPSKEVKQEQILSLFEDTFVPEISVTTPSQFEAPGPFSEQASLLDLDFDPLPPVTSPVKAPTPSGQSIPWDLWEPTESPAGSLPSGEPSAAEGTFAVSWPSQTAEPGPAQPAEASEVAGGTQPAAGAQEPGETAASEAASSSLPAVVVETFPATVNGTVEGGSGAGRLDLPPGFMFKVQAQHDYTATDTDELQLKAGDVVLVIPFQNPEEQDEGWLMGVKESDWNQHKELEKCRGVFPENFTERVP

SEQ ID NO: 100 - protein, 344 aa, synthetic construct
MHRTTRIKITELNPHLMCALCGGYFIDATTIVECLHSFCKTCIVRYLETNKYCPMCDVQVHKTRPLLSIRSDKTLQDIVYKLVPGLFKDEMKRRRDFYAAYPLTEVPNGSNEDRGEVLEQEKGALSDDEIVSLSIEFYEGARDRDEKKGPLENGDGDKEKTGVRFLRCPAAMTVMHLAKFLRNKMDVPSKYKVEVLYEDEPLKEYYTLMDIAYIYPWRRNGPLPLKYRVQPACKRLTLATVPTPSEGTNTSGASECESVSDKAPSPATLPATSSSLPSPATPSHGSPSSHGPPATHPTSPTPPSTASGATTAANGGSLNCLQTPSSTSRGRKMTVNGAPVPPLT

SEQ ID NO: 101 - protein, 526 aa, synthetic construct
MDVRFYPPPAQPAAAPDAPCLGPSPCLDPYYCNKFDGENMYMSMTEPSQDYVPASQSYPGPSLESEDFNIPPITPPSLPDHSLVHLNEVESGYHSLCHPMNHNGLLPFHPQNMDLPEITVSNMLGQDGTLLSNSISVMPDIRNPEGTQYSSHPQMAAMRPRGQPADIRQQPGMMPHGQLTTINQSQLSAQLGLNMGGSNVPHNSPSPPGSKSATPSPSSSVHEDEGDDTSKINGGEKRPASDMGKKPKTPKKKKKKDPNEPQKPVSAYALFFRDTQAAIKGQNPNATFGEVSKIVASMWDGLGEEQKQVYKKKTEAAKKEYLKQLAAYRASLVSKSYSEPVDVKTSQPPQLINSKPSVFHGPSQAHSALYLSSHYHQQPGMNPHLTAMHPSLPRNIAPKPNNQMPVTVSIANMAVSPPPPLQISPPLHQHLNMQQHQPLTMQQPLGNQLPMQVQSALHSPTMQQGFTLQPDYQTIINPTSTAAQVVTQAMEYVRSGCRNPPPQPVDWNNDYCSSGGMQRDKALYLT

SEQ ID NO: 102 - protein, 472 aa, synthetic construct
MLGTVKMEGHETSDWNSYYADTQEAYSSVPVSNMNSGLGSMNSMNTYMTMNTMTTSGNMTPASFNMSYANPGLGAGLSPGAVAGMPGGSAGAMNSMTAAGVTAMGTALSPSGMGAMGAQQAASMNGLGPYAAAMNPCMSPMAYAPSNLGRSRAGGGGDAKTFKRSYPHAKPPYSYISLITMAIQQAPSKMLTLSEIYQWIMDLFPYYRQNQQRWQNSIRHSLSFNDCFVKVARSPDKPGKGSYWTLHPDSGNMFENGCYLRRQKRFKCEKQPGAGGGGGSGSGGSGAKGGPESRKDPSGASNPSADSPLHRGVHGKTGQLEGAPAPGPAASPQTLDHSGATATGGASELKTPASSTAPPISSGPGALASVPASHPAHGLAPHESQLHLKGDPHYSFNHPFSINNLMSSSEQQHKLDFKAYEQALQYSPYGSTLPASLPLGSASVTTRSPIEPSALEPAYYQGVYSRPVLNTS

SEQ ID NO: 103 - protein, 457 aa, synthetic construct
MLGAVKMEGHEPSDWSSYYAEPEGYSSVSNMNAGLGMNGMNTYMSMSAAAMGSGSGNMSAGSMNMSSYVGAGMSPSLAGMSPGAGAMAGMGGSAGAAGVAGMGPHLSPSLSPLGGQAAGAMGGLAPYANMNSMSPMYGQAGLSRARDPKTYRRSYTHAKPPYSYISLITMAIQQSPNKMLTLSEIYQWIMDLFPFYRQNQQRWQNSIRHSLSFNDCFLKVPRSPDKPGKGSFWTLHPDSGNMFENGCYLRRQKRFKCEKQLALKEAAGAAGSGKKAAAGAQASQAQLGEAAGPASETPAGTESPHSSASPCQEHKRGGLGELKGTPAAALSPPEPAPSPGQQQQAAAHLLGPPHHPGLPPEAHLKPEHHYAFNHPFSINNLMSSEQQHHHSHHHHQPHKMDLKAYEQVMHYPGYGSPMPGSLAMGPVTNKTGLDASPLAADTSYYQGVYSRPIMNSS

SEQ ID NO: 104 - protein, 584 aa, synthetic construct
MASVQASRRQWCYLCDLPKMPWAMVWDFSEAVCRGCVNFEGADRIELLIDAARQLKRSHVLPEGRSPGPPALKHPATKDLAAAAAQGPQLPPPQAQPQPSGTGGGVSGQDRYDRATSSGRLPLPSPALEYTLGSRLANGLGREEAVAEGARRALLGSMPGLMPPGLLAAAVSGLGSRGLTLAPGLSPARPLFGSDFEKEKQQRNADCLAELNEAMRGRAEEWHGRPKAVREQLLALSACAPFNVRFKKDHGLVGRVFAFDATARPPGYEFELKLFTEYPCGSGNVYAGVLAVARQMFHDALREPGKALASSGFKYLEYERRHGSGEWRQLGELLTDGVRSFREPAPAEALPQQYPEPAPAALCGPPPRAPSRNLAPTPRRRKASPEPEGEAAGKMTTEEQQQRHWVAPGGPYSAETPGVPSPIAALKNVAEALGHSPKDPGGGGGPVRAGGASPAASSTAQPPTQHRLVARNGEAEVSPTAGAEAVSGGGSGTGATPGAPLCCTLCRERLEDTHFVQCPSVPGHKFCFPCSREFIKAQGPAGEVYCPSGDKCPLVGSSVPWAFMQGEIATILAGDIKVKKERDP

SEQ ID NO: 105 - protein, 587 aa, synthetic construct
MAAAVAVAAASRRQSCYLCDLPRMPWAMIWDFTEPVCRGCVNYEGADRVEFVIETARQLKRAHGCFPEGRSPPGAAASAAAKPPPLSAKDILLQQQQQLGHGGPEAAPRAPQALERYPLAAAAERPPRLGSDFGSSRPAASLAQPPTPQPPPVNGILVPNGFSKLEEPPELNRQSPNPRRGHAVPPTLVPLMNGSATPLPTALGLGGRAAASLAAVSGTAAASLGSAQPTDLGAHKRPASVSSSAAVEHEQREAAAKEKQPPPPAHRGPADSLSTAAGAAELSAEGAGKSRGSGEQDWVNRPKTVRDTLLALHQHGHSGPFESKFKKEPALTAGRLLGFEANGANGSKAVARTARKRKPSPEPEGEVGPPKINGEAQPWLSTSTEGLKIPMTPTSSFVSPPPPTASPHSNRTTPPEAAQNGQSPMAALILVADNAGGSHASKDANQVHSTTRRNSNSPPSPSSMNQRRLGPREVGGQGAGNTGGLEPVHPASLPDSSLATSAPLCCTLCHERLEDTHFVQCPSVPSHKFCFPCSRQSIKQQGASGEVYCPSGEKCPLVGSNVPWAFMQGEIATILAGDVKVKKERDS

SEQ ID NO: 106 - protein, 796 aa, synthetic construct
MSAAQVSSSRRQSCYLCDLPRMPWAMIWDFSEPVCRGCVNYEGADRIEFVIETARQLKRAHGCFQDGRSPGPPPPVGVKTVALSAKEAAAAAAAAAAAAAAAQQQQQQQQQQQQQQQQQQQQQQQQQLNHVDGSSKPAVLAAPSGLERYGLSAAAAAAAAAAAAVEQRSRFEYPPPPVSLGSSSHTARLPNGLGGPNGFPKPTPEEGPPELNRQSPNSSSAAASVASRRGTHGGLVTGLPNPGGGGGPQLTVPPNLLPQTLLNGPASAAVLPPPPPHALGSRGPPTPAPPGAPGGPACLGGTPGVSATSSSASSSTSSSVAEVGVGAGGKRPGSVSSTDQERELKEKQRNAEALAELSESLRNRAEEWASKPKMVRDTLLTLAGCTPYEVRFKKDHSLLGRVFAFDAVSKPGMDYELKLFIEYPTGSGNVYSSASGVAKQMYQDCMKDFGRGLSSGFKYLEYEKKHGSGDWRLLGDLLPEAVRFFKEGVPGADMLPQPYLDASCPMLPTALVSLSRAPSAPPGTGALPPAAPSGRGAAASLRKRKASPEPPDSAEGALKLGEEQQRQQWMANQSEALKLTMSAGGFAAPGHAAGGPPPPPPPLGPHSNRTTPPESAPQNGPSPMAALMSVADTLGTAHSPKDGSSVHSTTASARRNSSSPVSPASVPGQRRLASRNGDLNLQVAPPPPSAHPGMDQVHPQNIPDSPMANSGPLCCTICHERLEDTHFVQCPSVPSHKFCFPCSRESIKAQGATGEVYCPSGEKCPLVGSNVPWAFMQGEIATILAGDVKVKKERDP

SEQ ID NO: 107 - protein, 388 aa, synthetic construct
MTASVLLHPRWIEPTVMFLYDNGGGLVADELNKNMEGAAAAAAAAAAAAAAGAGGGGFPHPAAAAAGGNFSVAAAAAAAAAAAANQCRNLMAHPAPLAPGAASAYSSAPGEAPPSAAAAAAAAAAAAAAAAAASSSGGPGPAGPAGAEAAKQCSPCSAAAQSSSGPAALPYGYFGSGYYPCARMGPHPNAIKSCAQPASAAAAAAFADKYMDTAGPAAEEFSSRAKEFAFYHQGYAAGPYHHHQPMPGYLDMPVVPGLGGPGESRHEPLGLPMESYQPWALPNGWNGQMYCPKEQAQPPHLWKSTLPDVVSHPSDASSYRRGRKKRVPYTKVQLKELEREYATNKFITKDKRRRISATTNLSERQVTIWFQNRRVKEKKVINKLKTTS

SEQ ID NO: 108 - protein, 284 aa, synthetic construct
MEPGNYATLDGAKDIEGLLGAGGGRNLVAHSPLTSHPAAPTLMPAVNYAPLDLPGSAEPPKQCHPCPGVPQGTSPAPVPYGYFGGGYYSCRVSRSSLKPCAQAATLAAYPAETPTAGEEYPSRPTEFAFYPGYPGTYQPMASYLDVSVVQTLGAPGEPRHDSLLPVDSYQSWALAGGWNSQMCCQGEQNPPGPFWKAAFADSSGQHPPDACAFRRGRKKRIPYSKGQLRELEREYAANKFITKDKRRKISAATSLSERQITIWFQNRRVKEKKVLAKVKNSATP

SEQ ID NO: 109 - protein, 330 aa, synthetic construct
MTTSLLLHPRWPESLMYVYEDSAAESGIGGGGGGGGGGTGGAGGGCSGASPGKAPSMDGLGSSCPASHCRDLLPHPVLGRPPAPLGAPQGAVYTDIPAPEAARQCAPPPAPPTSSSATLGYGYPFGGSYYGCRLSHNVNLQQKPCAYHPGDKYPEPSGALPGDDLSSRAKEFAFYPSFASSYQAMPGYLDVSVVPGISGHPEPRHDALIPVEGYQHWALSNGWDSQVYCSKEQSQSAHLWKSPFPDVVPLQPEVSSYRRGRKKRVPYTKVQLKELEKEYAASKFITKEKRRRISATTNLSERQVTIWFQNRRVKEKKVVSKSKAPHLHST

SEQ ID NO: 110 - protein, 313 aa, synthetic construct
MDFDERGPCSSNMYLPSCTYYVSGPDFSSLPSFLPQTPSSRPMTYSYSSNLPQVQPVREVTFREYAIEPATKWHPRGNLAHCYSAEELVHRDCLQAPSAAGVPGDVLAKSSANVYHHPTPAVSSNFYSTVGRNGVLPQAFDQFFETAYGTPENLASSDYPGDKSAEKGPPAATATSAAAAAAATGAPATSSSDSGGGGGCRETAAAAEEKERRRRPESSSSPESSSGHTEDKAGGSSGQRTRKKRCPYTKYQIRELEREFFFSVYINKEKRLQLSRMLNLTDRQVKIWFQNRRMKEKKINRDRLQYYSANPLL

SEQ ID NO: 111 - protein, 304 aa, synthetic construct
MFNSVNLGNFCSPSRKERGADFGERGSCASNLYLPSCTYYMPEFSTVSSFLPQAPSRQISYPYSAQVPPVREVSYGLEPSGKWHHRNSYSSCYAAADELMHRECLPPSTVTEILMKNEGSYGGHHHPSAPHATPAGFYSSVNKNSVLPQAFDRFFDNAYCGGGDPPAEPPCSGKGEAKGEPEAPPASGLASRAEAGAEAEAEEENTNPSSSGSAHSVAKEPAKGAAPNAPRTRKKRCPYSKFQIRELEREFFFNVYINKEKRLQLSRMLNLTDRQVKIWFQNRRMKEKKLSRDRLQYFSGNPLL

SEQ ID NO: 112 - protein, 342 aa, synthetic construct
MTCPRNVTPNSYAEPLAAPGGGERYSRSAGMYMQSGSDFNCGVMRGCGLAPSLSKRDEGSSPSLALNTYPSYLSQLDSWGDPKAAYRLEQPVGRPLSSCSYPPSVKEENVCCMYSAEKRAKSGPEAALYSHPLPESCLGEHEVPVPSYYRASPSYSALDKTPHCSGANDFEAPFEQRASLNPRAEHLESPQLGGKVSFPETPKSDSQTPSPNEIKTEQSLAGPKGSPSESEKERAKAADSSPDTSDNEAKEEIKAENTTGNWLTAKSGRKKRCPYTKHQTLELEKEFLFNMYLTRERRLEISKTINLTDRQVKIWFQNRRMKLKKMNRENRIRELTSNFNFT

SEQ ID NO: 113 - protein, 410 aa, synthetic construct
MSARKGYLLPSPNYPTTMSCSESPAANSFLVDSLISSGRGEAGGGGGGAGGGGGGGYYAHGGVYLPPAADLPYGLQSCGLFPTLGGKRNEAASPGSGGGGGGLGPGAHGYGPSPIDLWLDAPRSCRMEPPDGPPPPPQQQPPPPPQPPQPAPQATSCSFAQNIKEESSYCLYDSADKCPKVSATAAELAPFPRGPPPDGCALGTSSGVPVPGYFRLSQAYGTAKGYGSGGGGAQQLGAGPFPAQPPGRGFDLPPALASGSADAARKERALDSPPPPTLACGSGGGSQGDEEAHASSSAAEELSPAPSESSKASPEKDSLGNSKGENAANWLTAKSGRKKRCPYTKHQTLELEKEFLFNMYLTRERRLEISRSVHLTDRQVKIWFQNRRMKLKKMNRENRIRELTANFNFS

SEQ ID NO: 114 - protein, 250 aa, synthetic construct
MSISGTLSSYYVDSIISHESEDAPPAKFPSGQYASSRQPGHAEHLEFPSCSFQPKAPVFGASWAPLSPHASGSLPSVYHPYIQPQGVPPAESRYLRTWLEPAPRGEAAPGQGQAAVKAEPLLGAPGELLKQGTPEYSLETSAGREAVLSNQRPGYGDNKICEGSEDKERPDQTNPSANWLHARSSRKKRCPYTKYQTLELEKEFLFNMYLTRDRRHEVARLLNLSERQVKIWFQNRRMKMKKMNKEQGKE

SEQ ID NO: 115 - protein, 272 aa, synthetic construct
MATTGALGNYYVDSFLLGADAADELSVGRYAPGTLGQPPRQAATLAEHPDFSPCSFQSKATVFGASWNPVHAAGANAVPAAVYHHHHHHPYVHPQAPVAAAAPDGRYMRSWLEPTPGALSFAGLPSSRPYGIKPEPLSARRGDCPTLDTHTLSLTDYACGSPPVDREKQPSEGAFSENNAENESGGDKPPIDPNNPAANWLHARSTRKKRCPYTKHQTLELEKEFLFNMYLTRDRRYEVARLLNLTERQVKIWFQNRRMKMKKINKDRAKDE

SEQ ID NO: 116 - protein, 80 aa, Homo sapiens
NKKLEAVGTGIEPKAMSQGLVTFGDVAVDFSQEEWEWLNPIQRNLYRKVMLENYRNLASLGLCVSKPDVISSLEQGKEPW

SEQ ID NO: 117 - protein, 80 aa, Homo sapiens
KMKKFQIPVSFQDLTVNFTQEEWQQLDPAQRLLYRDVMLENYSNLVSVGYHVSKPDVIFKLEQGEEPWIVEEFSNQNYPD

SEQ ID NO: 118 - protein, 80 aa, Homo sapiens
CSQESALSEEEEDTTRPLETVTFKDVAVDLTQEEWEQMKPAQRNLYRDVMLENYSNLVTVGCQVTKPDVIFKLEQEEEPW

SEQ ID NO: 119 - protein, 80 aa, Homo sapiens
ITSQGSVSFRDVTVGFTQEEWQHLDPAQRTLYRDVMLENYSHLVSVGYCIPKPEVILKLEKGEEPWILEEKFPSQSHLEL

SEQ ID NO: 120 - protein, 80 aa, Homo sapiens
PQVTFNDVAIDFTHEEWGWLSSAQRDLYKDVMVQNYENLVSVAGLSVTKPYVITLLEDGKEPWMMEKKLSKGMIPDWESR

SEQ ID NO: 121 - protein, 80 aa, Homo sapiens
PLRFSTLFQEQQKMNISQASVSFKDVTIEFTQEEWQQMAPVQKNLYRDVMLENYSNLVSVGYCCFKPEVIFKLEQGEEPW

SEQ ID NO: 122 - protein, 80 aa, Homo sapiens
QDPSAEGLSEEVPVVFEELPVVFEDVAVYFTREEWGMLDKRQKELYRDVMRMNYELLASLGPAAAKPDLISKLERRAAPW

SEQ ID NO: 123 - protein, 80 aa, Homo sapiens
SQGSVTFRDVAIDFSQEEWKWLQPAQRDLYRCVMLENYGHLVSLGLSISKPDVVSLLEQGKEPWLGKREVKRDLFSVSES

SEQ ID NO: 124 - protein, 80 aa, Homo sapiens
GSLTFRDVAIEFSLEEWQCLDTAQQNLYRNVMLENYRNLVFLGIAAFKPDLIIFLEEGKESWNMKRHEMVEESPVICSHF

SEQ ID NO: 125 - protein, 80 aa, Homo sapiens
NKSQEQVSFKDVCVDFTQEEWYLLDPAQKILYRDVILENYSNLVSVGYCITKPEVIFKIEQGEEPWILEKGFPSQCHPER

SEQ ID NO: 126 - protein, 80 aa, Homo sapiens
PHLLVTFRDVAIDFSQEEWECLDPAQRDLYRDVMLENYSNLISLDLESSCVTKKLSPEKEIYEMESLQWENMGKRINHHL

SEQ ID NO: 127 - protein, 80 aa, Homo sapiens
EEERKTAELQKNRIQDSVVFEDVAVDFTQEEWALLDLAQRNLYRDVMLENFQNLASLGYPLHTPHLISQWEQEEDLQTVK

SEQ ID NO: 128 - protein, 80 aa, Homo sapiens
GLLTFRDVAIEFSLEEWQCLDTAQKNLYRNVMLENYRNLAFLGIAVSKPDLIICLEKEKEPWNMKRDEMVDEPPGICPHF

SEQ ID NO: 129 - protein, 80 aa, Homo sapiens
RAPTQVTVSPETHMDLTKGCVTFEDIAIYFSQDEWGLLDEAQRLLYLEVMLENFALVASLGCGHGTEDEETPSDQNVSVG

SEQ ID NO: 130 - protein, 80 aa, Homo sapiens
AAVSPTTRCQESVTFEDVAVVFTDEEWSRLVPIQRDLYKEVMLENYNSIVSLGLPVPQPDVIFQLKRGDKPWMVDLHGSE

SEQ ID NO: 131 - protein, 80 aa, Homo sapiens
HSLEKVTFEDVAIDFTQEEWDMMDTSKRKLYRDVMLENISHLVSLGYQISKSYIILQLEQGKELWREGRVFLQDQNPDRE

SEQ ID NO: 132 - protein, 80 aa, Homo sapiens
DSVSFEDVAVNFTLEEWALLDSSQKKLYEDVMQETFKNLVCLGKKWEDQDIEDDHRNQGKNRRCHMVERLCESRRGSKCG

SEQ ID NO: 133 - protein, 80 aa, Homo sapiens
NVEVVKVMPQDLVTFKDVAIDFSQEEWQWMNPAQKRLYRSMMLENYQSLVSLGLCISKPYVISLLEQGREPWEMTSEMTR

SEQ ID NO: 134 - protein, 80 aa, Homo sapiens
TQPDEDLHLQAEETQLVKESVTFKDVAIDFTLEEWRLMDPTQRNLHKDVMLENYRNLVSLGLAVSKPDMISHLENGKGPW

SEQ ID NO: 135 - protein, 80 aa, Homo sapiens
TMLQESFSFDDLSVDFTQKEWQLLDPSQKNLYKDVMLENYSSLVSLGYEVMKPDVIFKLEQGEEPWVGDGEIPSSDSPEV

SEQ ID NO: 136 - protein, 80 aa, Homo sapiens
EVVTFGDVAVHFSREEWQCLDPGQRALYREVMLENHSSVAGLAGFLVFKPELISRLEQGEEPWVLDLQGAEGTEAPRTSK

SEQ ID NO: 137 - protein, 80 aa, Homo sapiens
RNAEEERMIAVFLTTWLQEPMTFKDVAVEFTQEEWMMLDSAQRSLYRDVMLENYRNLTSVEYQLYRLTVISPLDQEEIRN

SEQ ID NO: 138 - protein, 80 aa, Homo sapiens
GPQGARRQAFLAFGDVTVDFTQKEWRLLSPAQRALYREVTLENYSHLVSLGILHSKPELIRRLEQGEVPWGEERRRRPGP

SEQ ID NO: 139 - protein, 80 aa, Homo sapiens
HSLKKLTFEDVAIDFTQEEWAMMDTSKRKLYRDVMLENISHLVSLGYQISKSYIILQLEQGKELWREGRVFLQDQNPNRE

SEQ ID NO: 140 - protein, 80 aa, Homo sapiens
MPEVEFPDQFFTVLTMDHELVTLRDVVINFSQEEWEYLDSAQRNLYWDVMMENYSNLLSLDLESRNETKHLSVGKDIIQN

SEQ ID NO: 141 - protein, 80 aa, Homo sapiens
PGAPGSLEMGPLTFRDVTIEFSLEEWQCLDTVQQNLYRDVMLENYRNLVFLGMAVFKPDLITCLKQGKEPWNMKRHEMVT

SEQ ID NO: 142 - protein, 80 aa, Homo sapiens
RDPAQVPVAADLLTDHEEGYVTFEDVAVYFSQEEWRLLDDAQRLLYRNVMLENFTLLASLGLASSKTHEITQLESWEEPF

SEQ ID NO: 143 - protein, 80 aa, Homo sapiens
HSLKKVTFEDVAIDFTQEEWAMMDTSKRKLYRDVMLENISHLVSLGYQISKSYIILQLEQGKELWREGREFLQDQNPDRE

SEQ ID NO: 144 - protein, 80 aa, Homo sapiens
TKSKEAVTFKDVAVVFSEEELQLLDLAQRKLYRDVMLENFRNVVSVGHQSTPDGLPQLEREEKLWMMKMATQRDNSSGAK

SEQ ID NO: 145 - protein, 80 aa, Homo sapiens
SQVTFSDVAIDFSHEEWACLDSAQRDLYKDVMVQNYENLVSVGLSVTKPYVIMLLEDGKEPWMMEKKLSKAYPFPLSHSV

SEQ ID NO: 146 - protein, 80 aa, Homo sapiens
PGPLRSLEMESLQFRDVAVEFSLEEWHCLDTAQQNLYRDVMLENYRHLVFLGIIVSKPDLITCLEQGIKPLTMKRHEMIA

SEQ ID NO: 147 - protein, 80 aa, Homo sapiens
LQTTWPQESVTFEDVAVYFTQNQWASLDPAQRALYGEVMLENYANVASLVAFPFPKPALISHLERGEAPWGPDPWDTEIL

SEQ ID NO: 148 - protein, 80 aa, Homo sapiens
APLLAPRPGETRPGCRKPGTVSFADVAVYFSPEEWGCLRPAQRALYRDVMQETYGHLGALGFPGPKPALISWMEQESEAW

SEQ ID NO: 149 - protein, 80 aa, Homo sapiens
NKVEQKSQESVSFKDVTVGFTQEEWQHLDPSQRALYRDVMLENYSNLVSVGYCVHKPEVIFRLQQGEEPWKQEEEFPSQS

SEQ ID NO: 150 - protein, 80 aa, Homo sapiens
CFSQEERMAAGYLPRWSQELVTFEDVSMDFSQEEWELLEPAQKNLYREVMLENYRNVVSLEALKNQCTDVGIKEGPLSPA

SEQ ID NO: 151 - protein, 80 aa, Homo sapiens
DSVAFEDVAVNFTQEEWALLDPSQKNLYREVMQETLRNLTSIGKKWNNQYIEDEHQNPRRNLRRLIGERLSESKESHQHG

SEQ ID NO: 152 - protein, 80 aa, Homo sapiens
MGPAQVPMNSEVIVDPIQGQVNFEDVFVYFSQEEWVLLDEAQRLLYRDVMLENFALMASLGHTSFMSHIVASLVMGSEPW

SEQ ID NO: 153 - protein, 80 aa, Homo sapiens
TTFKEAMTFKDVAVVFTEEELGLLDLAQRKLYRDVMLENFRNLLSVGHQAFHRDTFHFLREEKIWMMKTAIQREGNSGDK

SEQ ID NO: 154 - protein, 80 aa, Homo sapiens
DSTLLQGGHNLLSSASFQEAVTFKDVIVDFTQEEWKQLDPGQRDLFRDVTLENYTHLVSIGLQVSKPDVISQLEQGTEPW

SEQ ID NO: 155 - protein, 80 aa, Homo sapiens
EARSMLVPPQASVCFEDVAMAFTQEEWEQLDLAQRTLYREVTLETWEHIVSLGLFLSKSDVISQLEQEEDLCRAEQEAPR

SEQ ID NO: 156 - protein, 80 aa, Homo sapiens
DSVVFEDVAVDFTLEEWALLDSAQRDLYRDVMLETFRNLASVDDGTQFKANGSVSLQDMYGQEKSKEQTIPNFTGNNSCA

SEQ ID NO: 157 - protein, 80 aa, Homo sapiens
EESHGALISSCNSRTMTDGLVTFRDVAIDFSQEEWECLDPAQRDLYVDVMLENYSNLVSLDLESKTYETKKIFSENDIFE

SEQ ID NO: 158 - protein, 80 aa, Homo sapiens
VITPQIPMVTEEFVKPSQGHVTFEDIAVYFSQEEWGLLDEAQRCLYHDVMLENFSLMASVGCLHGIEAEEAPSEQTLSAQ

SEQ ID NO: 159 - protein, 80 aa, Homo sapiens
VQLRPQTRMATALRDPASGSVTFEDVAVYFSWEEWDLLDEAQKHLYFDVMLENFALTSSLGCWCGVEHEETPSEQRISGE

SEQ ID NO: 160 - protein, 80 aa, Homo sapiens
MQAQESLTLEDVAVDFTWEEWQFLSPAQKDLYRDVMLENYSNLVAVGYQASKPDALSKLERGEETCTTEDEIYSRICSEI

SEQ ID NO: 161 - protein, 80 aa, Homo sapiens
GPLQFRDVAIEFSLEEWHCLDTAQRNLYRDVMLENYRNLVFLGIVVSKPDLVTCLEQGKKPLTMERHEMIAKPPVMSSHF

SEQ ID NO: 162 - protein, 80 aa, Homo sapiens
NMFKEAVTFKDVAVAFTEEELGLLGPAQRKLYRDVMVENFRNLLSVGHPPFKQDVSPIERNEQLWIMTTATRRQGNLGEK

SEQ ID NO: 163 - protein, 80 aa, Homo sapiens
GALTFRDVAIEFSLEEWQCLDTEQQNLYRNVMLDNYRNLVFLGIAVSKPDLITCLEQEKEPWNLKTHDMVAKPPVICSHI

SEQ ID NO: 164 - protein, 80 aa, Homo sapiens
SPQKSSALAPEDHGSSYEGSVSFRDVAIDFSREEWRHLDPSQRNLYRDVMLETYSHLLSVGYQVPEAEVVMLEQGKEPWA

SEQ ID NO: 165 - protein, 80 aa, Homo sapiens
ELLTFRDVAIEFSPEEWKCLDPAQQNLYRDVMLENYRNLISLGVAISNPDLVIYLEQRKEPYKVKIHETVAKHPAVCSHF

SEQ ID NO: 166 - protein, 80 aa, Homo sapiens
EPLKFRDVAIEFSLEEWQCLDTIQQNLYRNVMLENYRNLVFLGIVVSKPDLITCLEQEKEPWTRKRHRMVAEPPVICSHF

SEQ ID NO: 167 - protein, 80 aa, Homo sapiens
PSARGKSKSKAPITFGDLAIYFSQEEWEWLSPIQKDLYEDVMLENYRNLVSLGLSFRRPNVITLLEKGKAPWMVEPVRRR

SEQ ID NO: 168 - protein, 80 aa, Homo sapiens
TKAQESLTLEDVAVDFTWEEWQFLSPAQKDLYRDVMLENYSNLVSVGYQAGKPDALTKLEQGEPLWTLEDEIHSPAHPEI

SEQ ID NO: 169 - protein, 80 aa, Homo sapiens
SQEEVEVAGIKLCKAMSLGSVTFTDVAIDFSQDEWEWLNLAQRSLYKKVMLENYRNLVSVGLCISKPDVISLLEQEKDPW

SEQ ID NO: 170 - protein, 80 aa, Homo sapiens
TKSLESVSFKDVTVDFSRDEWQQLDLAQKSLYREVMLENYFNLISVGCQVPKPEVIFSLEQEEPCMLDGEIPSQSRPDGD

SEQ ID NO: 171 - protein, 80 aa, Homo sapiens
SGCPGAERNLLVYSYFEKETLTFRDVAIEFSLEEWECLNPAQQNLYMNVMLENYKNLVFLGVAVSKQDPVTCLEQEKEPW

SEQ ID NO: 172 - protein, 80 aa, Homo sapiens
PLQGSVSFKDVTVDFTQEEWQQLDPAQKALYRDVMLENYCHFVSVGFHMAKPDMIRKLEQGEELWTQRIFPSYSYLEEDG

SEQ ID NO: 173 - protein, 80 aa, Homo sapiens
PGPPRSLEMGLLTFRDVAIEFSLEEWQHLDIAQQNLYRNVMLENYRNLAFLGIAVSKPDLITCLEQGKEPWNMKRHEMVD

SEQ ID NO: 174 - protein, 80 aa, Homo sapiens
SGHPGSWEMNSVAFEDVAVNFTQEEWALLDPSQKNLYRDVMQETFRNLASIGNKGEDQSIEDQYKNSSRNLRHIISHSGN

SEQ ID NO: 175 - protein, 80 aa, Homo sapiens
SYGSITFGDVAIDFSHQEWEYLSLVQKTLYQEVMMENYDNLVSLAGHSVSKPDLITLLEQGKEPWMIVREETRGECTDLD

SEQ ID NO: 176 - protein, 80 aa, Homo sapiens
DLFVCSGLEPHTPSVGSQESVTFQDVAVDFTEKEWPLLDSSQRKLYKDVMLENYSNLTSLGYQVGKPSLISHLEQEEEPR

SEQ ID NO: 177 - protein, 80 aa, Homo sapiens
FQTAWRQEPVTFEDVAVYFTQNEWASLDSVQRALYREVMLENYANVASLAFPFTTPVLVSQLEQGELPWGLDPWEPMGRE

SEQ ID NO: 178 - protein, 80 aa, Homo sapiens
ELLTFRDVAIEFSPEEWKCLDPDQQNLYRDVMLENYRNLVSLGVAISNPDLVTCLEQRKEPYNVKIHKIVARPPAMCSHF

SEQ ID NO: 179 - protein, 80 aa, Homo sapiens
AGEAEAQLDPSLQGLVMFEDVTVYFSREEWGLLNVTQKGLYRDVMLENFALVSSLGLAPSRSPVFTQLEDDEQSWVPSWV

SEQ ID NO: 180 - protein, 80 aa, Homo sapiens
AHALVTFRDVAIDFSQKEWECLDTTQRKLYRDVMLENYNNLVSLGYSGSKPDVITLLEQGKEPCVVARDVTGRQCPGLLS

SEQ ID NO: 181 - protein, 80 aa, Homo sapiens
KRIKHWKMASKLILPESLSLLTFEDVAVYFSEEEWQLLNPLEKTLYNDVMQDIYETVISLGLKLKNDTGNDHPISVSTSE

SEQ ID NO: 182 - protein, 80 aa, Homo sapiens
DSVVFEDVAVDFTLEEWALLDSAQRDLYRDVMLETFQNLASVDDETQFKASGSVSQQDIYGEKIPKESKIATFTRNVSWA

SEQ ID NO: 183 - protein, 80 aa, Homo sapiens
NMSQASVSFQDVTVEFTREEWQHLGPVERTLYRDVMLENYSHLISVGYCITKPKVISKLEKGEEPWSLEDEFLNQRYPGY

SEQ ID NO: 184 - protein, 80 aa, Homo sapiens
ISFQESVTFQDVAVDFTAEEWQLLDCAERTLYWDVMLENYRNLISVGCPITKTKVILKVEQGQEPWMVEGANPHESSPES

SEQ ID NO: 185 - protein, 80 aa, Homo sapiens
NTLQGPVSFKDVAVDFTQEEWQQLDPDEKITYRDVMLENYSHLVSVGYDTTKPNVIIKLEQGEEPWIMGGEFPCQHSPEA

SEQ ID NO: 186 - protein, 80 aa, Homo sapiens
HPEEEERMHDELLQAVSKGPVMFRDVSIDFSQEEWECLDADQMNLYKEVMLENFSNLVSVGLSNSKPAVISLLEQGKEPW

SEQ ID NO: 187 - protein, 80 aa, Homo sapiens
SLGSELFRDVAIVFSQEEWQWLAPAQRDLYRDVMLETYSNLVSLGLAVSKPDVISFLEQGKEPWMVERVVSGGLCPVLES

SEQ ID NO: 188 - protein, 80 aa, Homo sapiens
TKFQEMVTFKDVAVVFTEEELGLLDSVQRKLYRDVMLENFRNLLLVAHQPFKPDLISQLEREEKLLMVETETPRDGCSGR

SEQ ID NO: 189 - protein, 80 aa, Homo sapiens
AKRPGPPGSREMGLLTFRDIAIEFSLAEWQCLDHAQQNLYRDVMLENYRNLVSLGIAVSKPDLITCLEQNKEPQNIKRNE

SEQ ID NO: 190 - protein, 80 aa, Homo sapiens
TCMVHRQTMSCSGAGGITAFVAFRDVAVYFTQEEWRLLSPAQRTLHREVMLETYNHLVSLEIPSSKPKLIAQLERGEAPW

SEQ ID NO: 191 - protein, 80 aa, Homo sapiens
IQAQESITLEDVAVDFTWEEWQLLGAAQKDLYRDVMLENYSNLVAVGYQASKPDALFKLEQGEQLWTIEDGIHSGACSDI

SEQ ID NO: 192 - protein, 80 aa, Homo sapiens
AQKRRKRKAKESGMALPQGHLTFRDVAIEFSQAEWKCLDPAQRALYKDVMLENYRNLVSLGISLPDLNINSMLEQRREPW

SEQ ID NO: 193 - protein, 80 aa, Homo sapiens
DSTSVPVTAEAKLMGFTQGCVTFEDVAIYFSQEEWGLLDEAQRLLYRDVMLENFALITALVCWHGMEDEETPEQSVSVEG

SEQ ID NO: 194 - protein, 80 aa, Homo sapiens
GPLTFRDVKIEFSLEEWQCLDTAQRNLYRDVMLENYRNLVFLGIAVSKPDLITWLEQGKEPWNLKRHEMVDKTPVMCSHF

SEQ ID NO: 195 - protein, 80 aa, Homo sapiens
SGCPGAERSLLVQSYFEKGPLTFRDVAIEFSLEEWQCLDSAQQGLYRKVMLENYRNLVFLAGIALTKPDLITCLEQGKEP

SEQ ID NO: 196 - protein, 80 aa, Homo sapiens
GVLTFRDVAVEFSPEEWECLDSAQQRLYRDVMLENYGNLVSLGLAIFKPDLMTCLEQRKEPWKVKRQEAVAKHPAGSFHF

SEQ ID NO: 197 - protein, 80 aa, Homo sapiens
KENLEDISGWGLPEARSKESVSFKDVAVDFTQEEWGQLDSPQRALYRDVMLENYQNLLALGPPLHKPDVISHLERGEEPW

SEQ ID NO: 198 - protein, 80 aa, Homo sapiens
EESEKPRGFARGLEPERIIGATDSSGELMFLMKWKNSDEADLVPAKEANVKCPQVVISFYEERLTWHSYPSEDDDKKDDK

SEQ ID NO: 199 - protein, 80 aa, Homo sapiens
ASVALEDVAVNFTREEWALLGPCQKNLYKDVMQETIRNLDCVVMKWKDQNIEDQYRYPRKNLRCRMLERFVESKDGTQCG

SEQ ID NO: 200 - protein, 80 aa, Homo sapiens
TLLTFRDVAIEFSLEEWKCLDLAQQNLYRDVMLENYRNLFSVGLTVCKPGLITCLEQRKEPWNVKRQEAADGHPEMGFHH

SEQ ID NO: 201 - protein, 80 aa, Homo sapiens
AAALRAPTQQVFVAFEDVAIYFSQEEWELLDEMQRLLYRDVMLENFAVMASLGCWCGAVDEGTPSAESVSVEELSQGRTP

SEQ ID NO: 202 - protein, 80 aa, Homo sapiens
NTFQASVSFQDVTVEFSQEEWQHMGPVERTLYRDVMLENYSHLVSVGYCFTKPELIFTLEQGEDPWLLEKEKGFLSRNSP

SEQ ID NO: 203 - protein, 80 aa, Homo sapiens
DSVAFEDVSVSFSQEEWALLAPSQKKLYRDVMQETFKNLASIGEKWEDPNVEDQHKNQGRNLRSHTGERLCEGKEGSQCA

SEQ ID NO: 204 - protein, 80 aa, Homo sapiens
AQGLVTFADVAIDFSQEEWACLNSAQRDLYWDVMLENYSNLVSLDLESAYENKSLPTEKNIHEIRASKRNSDRRSKSLGR

SEQ ID NO: 205 - protein, 80 aa, Homo sapiens
AVDLLSAQEPVTFRDVAVFFSQDEWLHLDSAQRALYREVMLENYSSLVSLGIPFSMPKLIHQLQQGEDPCMVEREVPSDT

SEQ ID NO: 206 - protein, 80 aa, Homo sapiens
SPQRFPALIPGEPGRSFEGSVSFEDVAVDFTRQEWHRLDPAQRTMHKDVMLETYSNLASVGLCVAKPEMIFKLERGEELW

SEQ ID NO: 207 - protein, 80 aa, Homo sapiens
RVLTFRDVAVEFSPEEWECLDSAQQRLYRDVMLENYGNLFSLGLAIFKPDLITYLEQRKEPWNARRQKTVAKHPAGSLHF

SEQ ID NO: 208 - protein, 80 aa, Homo sapiens
AETKDAAQMLVTFKDVAVTFTREEWRQLDLAQRTLYREVMLETCGLLVSLGHRVPKPELVHLLEHGQELWIVKRGLSHAT

SEQ ID NO: 209 - protein, 80 aa, Homo sapiens
IEYQIPVSFKDVVVGFTQEEWHRLSPAQRALYRDVMLETYSNLVSVGYEGTKPDVILRLEQEEAPWIGEAACPGCHCWED

SEQ ID NO: 210 - protein, 80 aa, Homo sapiens
TKFQEAVTFKDVAVAFTEEELGLLDSAQRKLYRDVMLENFRNLVSVGHQSFKPDMISQLEREEKLWMKELQTQRGKHSGD

SEQ ID NO: 211 - protein, 80 aa, Homo sapiens
DEGVAGVMSVGPPAARLQEPVTFRDVAVDFTQEEWGQLDPTQRILYRDVMLETFGHLLSIGPELPKPEVISQLEQGTELW

SEQ ID NO: 212 - protein, 80 aa, Homo sapiens
GPLTFMDVAIEFSVEEWQCLDTAQQNLYRNVMLENYRNLVFLGIAVSKPDLITCLEQGKEPWNMERHEMVAKPPGMCCYF

SEQ ID NO: 213 - protein, 80 aa, Homo sapiens
HQVGLIRSYNSKTMTCFQELVTFRDVAIDFSRQEWEYLDPNQRDLYRDVMLENYRNLVSLGGHSISKPVVVDLLERGKEP

SEQ ID NO: 214 - protein, 80 aa, Homo sapiens
NATIVMSVRREQGSSSGEGSLSFEDVAVGFTREEWQFLDQSQKVLYKEVMLENYINLVSIGYRGTKPDSLFKLEQGEPPG

SEQ ID NO: 215 - protein, 80 aa, Homo sapiens
FPPARGKELLSFEDVAMYFTREEWGHLNWGQKDLYRDVMLENYRNMVLLGFQFPKPEMICQLENWDEQWILDLPRTGNRK

SEQ ID NO: 216 - protein, 80 aa, Homo sapiens
ELLTFKDVAIEFSPEEWKCLDTSQQNLYRDVMLENYRNLVSLGVSISNPDLVTSLEQRKEPYNLKIHETAARPPAVCSHF

SEQ ID NO: 217 - protein, 80 aa, Homo sapiens
MKSQGLVSFKDVAVDFTQEEWQQLDPSQRTLYRDVMLENYSHLVSMGYPVSKPDVISKLEQGEEPWIIKGDISNWIYPDE

SEQ ID NO: 218 - protein, 80 aa, Homo sapiens
AEGSVMFSDVSIDFSQEEWDCLDPVQRDLYRDVMLENYGNLVSMGLYTPKPQVISLLEQGKEPWMVGRELTRGLCSDLES

SEQ ID NO: 219 - protein, 80 aa, Homo sapiens
GPLTFTDVAIEFSLEEWQCLDTAQQNLYRNVMLENYRNLVFLGIAVSKPDLITCLEKEKEPCKMKRHEMVDEPPVVCSHF

SEQ ID NO: 220 - protein, 80 aa, Homo sapiens
ALSQGLFTFKDVAIEFSQEEWECLDPAQRALYRDVMLENYRNLLSLDEDNIPPEDDISVGFTSKGLSPKENNKEELYHLV

SEQ ID NO: 221 - protein, 80 aa, Homo sapiens
NMEGLVMFQDLSIDFSQEEWECLDAAQKDLYRDVMMENYSSLVSLGLSIPKPDVISLLEQGKEPWMVSRDVLGGWCRDSE

SEQ ID NO: 222 - protein, 80 aa, Homo sapiens
AVSHLPTMVQESVTFKDVAILFTQEEWGQLSPAQRALYRDVMLENYSNLVSLGLLGPKPDTFSQLEKREVWMPEDTPGGF

SEQ ID NO: 223 - protein, 80 aa, Homo sapiens
GPLTIRDVTVEFSLEEWHCLDTAQQNLYRDVMLENYRNLVFLGIAVSKPDLITCLEQGKEPCNMKRHEMVAKPPVMCSHI

SEQ ID NO: 224 - protein, 80 aa, Homo sapiens
AAAVLTDRAQVSVTFDDVAVTFTKEEWGQLDLAQRTLYQEVMLENCGLLVSLGCPVPKAELICHLEHGQEPWTRKEDLSQ

SEQ ID NO: 225 - protein, 80 aa, Homo sapiens
ALRSVMFSDVSIDFSPEEWEYLDLEQKDLYRDVMLENYSNLVSLGCFISKPDVISSLEQGKEPWKVVRKGRRQYPDLETK

SEQ ID NO: 226 - protein, 80 aa, Homo sapiens
AHGSVTFRDVAIDFSQEEWEFLDPAQRDLYRDVMWENYSNFISLGPSISKPDVITLLDEERKEPGMVVREGTRRYCPDLE

SEQ ID NO: 227 - protein, 80 aa, Homo sapiens
APRAQIQGPLTFGDVAVAFTRIEWRHLDAAQRALYRDVMLENYGNLVSVGLLSSKPKLITQLEQGAEPWTEVREAPSGTH

SEQ ID NO: 228 - protein, 80 aa, Homo sapiens
GPLQFRDVAIEFSLEEWHCLDTAQRNLYRNVMLENYRNLVFLGIVVSKPDLITCLEQGKKPLTMKKHEMVANPSVTCSHF

SEQ ID NO: 229 - protein, 80 aa, Homo sapiens
TLPRGQPEVLEWGLPKDQDSVAFEDVAVNFTHEEWALLGPSQKNLYRDVMRETIRNLNCIGMKWENQNIDDQHQNLRRNP

SEQ ID NO: 230 - protein, 80 aa, Homo sapiens
PSPDSMTFEDIIVDFTQEEWALLDTSQRKLFQDVMLENISHLVSIGKQLCKSVVLSQLEQVEKLSTQRISLLQGREVGIK

SEQ ID NO: 231 - protein, 80 aa, Homo sapiens
EESREIRAGQIVLKAMAQGLVTFRDVAIEFSLEEWKCLEPAQRDLYREVTLENFGHLASLGLSISKPDVVSLLEQGKEPW

SEQ ID NO: 232 - protein, 80 aa, Homo sapiens
AASAQVSVTFEDVAVTFTQEEWGQLDAAQRTLYQEVMLETCGLLMSLGCPLFKPELIYQLDHRQELWMATKDLSQSSYPG

SEQ ID NO: 233 - protein, 80 aa, Homo sapiens
RESLEDEVTPGLPTAESQELLTFKDISIDFTQEEWGQLAPAHQNLYREVMLENYSNLVSVGYQLSKPSVISQLEKGEEPW

SEQ ID NO: 234 - protein, 80 aa, Homo sapiens
EGEYIKLKVIGQDSSEIHFKVKMTTHLKKLKESYCQRQGVPMNSLRFLFEGQRIADNHTPKELGMEEEDVIEVYQEQTGG

SEQ ID NO: 235 - protein, 80 aa, Homo sapiens
NKSLGPVSFKDVAVDFTQEEWQQLDPEQKITYRDVMLENYSNLVSVGYHIIKPDVISKLEQGEEPWIVEGEFLLQSYPDE

SEQ ID NO: 236 - protein, 80 aa, Homo sapiens
SPGLLTTRKEALMAFRDVAVAFTQKEWKLLSSAQRTLYREVMLENYSHLVSLGIAFSKPKLIEQLEQGDEPWREENEHLL

SEQ ID NO: 237 - protein, 80 aa, Homo sapiens
MFQDSVAFEDVAVTFTQEEWALLDPSQKNLCRDVMQETFRNLASIGKKWKPQNIYVEYENLRRNLRIVGERLFESKEGHQ

SEQ ID NO: 238 - protein, 80 aa, Homo sapiens
ENDHINLKVAGQDGSVVQFKIKRHTPLSKLMKAYCERQGLSMRQIRFRFDGQPINETDTPAQLEMEDEDTIDVFQQQTGG

SEQ ID NO: 239 - protein, 80 aa, Homo sapiens
PGPLGSLEMGVLTFRDVALEFSLEEWQCLDTAQQNLYRNVMLENYRNLVFVGIAASKPDLITCLEQGKEPWNVKRHEMVT

SEQ ID NO: 240 - protein, 80 aa, Homo sapiens
LSQKPQVLGPEKQDGSCEASVSFEDVTVDFSREEWQQLDPAQRCLYRDVMLELYSHLFAVGYHIPNPEVIFRMLKEKEPR

SEQ ID NO: 241 - protein, 80 aa, Homo sapiens
ALTQGQVTFRDVAIEFSQEEWTCLDPAQRTLYRDVMLENYRNLASLGISCFDLSIISMLEQGKEPFTLESQVQIAGNPDG

SEQ ID NO: 242 - protein, 80 aa, Homo sapiens
NKFQGPVTLKDVIVEFTKEEWKLLTPAQRTLYKDVMLENYSHLVSVGYHVNKPNAVFKLKQGKEPWILEVEFPHRGFPED

SEQ ID NO: 243 - protein, 80 aa, Homo sapiens
ELLTFRDVAIEFSPEEWKCLDPAQQNLYRDVMLENYRNLVSLAVYSYYNQGILPEQGIQDSFKKATLGRYGSCGLENICL

SEQ ID NO: 244 - protein, 80 aa, Homo sapiens
SPQKSSALAPEDHGSSYEGSVSFRDVAIDFSREEWRHLDLSQRNLYRDVMLETYSHLLSVGYQVPKPEVVMLEQGKEPWA

SEQ ID NO: 245 - protein, 80 aa, Homo sapiens
NNSQGRVTFEDVTVNFTQGEWQRLNPEQRNLYRDVMLENYSNLVSVGQGETTKPDVILRLEQGKEPWLEEEEVLGSGRAE

SEQ ID NO: 246 - protein, 80 aa, Homo sapiens
AMALPMPGPQEAVVFEDVAVYFTRIEWSCLAPDQQALYRDVMLENYGNLASLGFLVAKPALISLLEQGEEPGALILQVAE

SEQ ID NO: 247 - protein, 80 aa, Homo sapiens
DSSQHLVTFEDVAVDFTQEEWTLLDQAQRDLYRDVMLENYKNLIILAGSELFKRSLMSGLEQMEELRTGVTGVLQELDLQ

SEQ ID NO: 248 - protein, 80 aa, Homo sapiens
TTFKEAVTFKDVAVFFTEEELGLLDPAQRKLYQDVMLENFTNLLSVGHQPFHPFHFLREEKFWMMETATQREGNSGGKTI

SEQ ID NO: 249 - protein, 80 aa, Homo sapiens
GPLQFRDVAIEFSLEEWHCLDMAQRNLYRDVMLENYRNLVFLGIVVSKPDLITHLEQGKKPSTMQRHEMVANPSVLCSHF

SEQ ID NO: 250 - protein, 80 aa, Homo sapiens
NKSQGSVSFTDVTVDFTQEEWEQLDPSQRILYMDVMLENYSNLLSVEVWKADDQMERDHRNPDEQARQFLILKNQTPIEE

SEQ ID NO: 251 - protein, 80 aa, Homo sapiens
EEEEMNDGSQMVRSQESLTFQDVAVDFTREEWDQLYPAQKNLYRDVMLENYRNLVALGYQLCKPEVIAQLELEEEWVIER

SEQ ID NO: 252 - protein, 80 aa, Homo sapiens
EEATKKSKEKEPGMALPQGRLTFRDVAIEFSLEEWKCLNPAQRALYRAVMLENYRNLEFVDSSLKSMMEFSSTRHSITGE

SEQ ID NO: 253 - protein, 80 aa, Homo sapiens
EKTPAGRIVADCLTDCYQDSVTFDDVAVDFTQEEWTLLDSTQRSLYSDVMLENYKNLATVGGQIIKPSLISWLEQEESRT

SEQ ID NO: 254 - protein, 80 aa, Homo sapiens
AMSQESLTFKDVFVDFTLEEWQQLDSAQKNLYRDVMLENYSHLVSVGHLVGKPDVIFRLGPGDESWMADGGTPVRTCAGE

SEQ ID NO: 255 - protein, 80 aa, Homo sapiens
DSVAFEDVAVNFTLEEWALLDPSQKNLYRDVMRETFRNLASVGKQWEDQNIEDPFKIPRRNISHIPERLCESKEGGQGEE

SEQ ID NO: 256 - protein, 80 aa, Homo sapiens
MFQDSVAFEDVAVSFTQEEWALLDPSQKNLYRDVMQETFKNLTSVGKTWKVQNIEDEYKNPRRNLSLMREKLCESKESHH

SEQ ID NO: 257 - protein, 80 aa, Homo sapiens
AVVATLRLSAQGTVTFEDVAVKFTQEEWNLLSEAQRCLYRDVTLENLALMSSLGCWCGVEDEAAPSKQSIYIQRETQVRT

SEQ ID NO: 258 - protein, 80 aa, Homo sapiens
EEEEEDEDEDDLLTAGCQELVTFEDVAVYFSLEEWERLEADQRGLYQEVMQENYGILVSLGYPIPKPDLIFRLEQGEEPW

SEQ ID NO: 259 - protein, 80 aa, Homo sapiens
TKFQEMVTFKDVAVVFTREELGLLDLAQRKLYQDVMLENFRNLLSVGYQPFKLDVILQLGKEDKLRMMETEIQGDGCSGH

SEQ ID NO: 260 - protein, 80 aa, Homo sapiens
EEAAQKRKGKEPGMALPQGRLTFRDVAIEFSLAEWKCLNPSQRALYREVMLENYRNLEAVDISSKCMMKEVLSTGQGNTE

SEQ ID NO: 261 - protein, 80 aa, Homo sapiens
DTVVFEDVVVDFTLEEWALLNPAQRKLYRDVMLETFKHLASVDNEAQLKASGSISQQDTSGEKLSLKQKIEKFTRKNIWA

SEQ ID NO: 262 - protein, 80 aa, Homo sapiens
TTFKEGLTFKDVAVVFTEEELGLLDPVQRNLYQDVMLENFRNLLSVGHHPFKHDVFLLEKEKKLDIMKTATQRKGKSADK

SEQ ID NO: 263 - protein, 80 aa, Homo sapiens
SALQQEFWKIQTSNGIQMDLVTFDSVAVEFTQEEWTLLDPAQRNLYSDVMLENYKNLSSVGYQLFKPSLISWLEEEEELS

SEQ ID NO: 264 - protein, 80 aa, Homo sapiens
DCVIFEEVAVNFTPEEWALLDHAQRSLYRDVMLETCRNLASLDCYIYVRTSGSSSQRDVFGNGISNDEEIVKFTGSDSWS

SEQ ID NO: 265 - protein, 80 aa, Homo sapiens
ELLTFRDVTIEFSLEEWEFLNPAQQSLYRKVMLENYRNLVSLGLTVSKPELISRLEQRQEPWNVKRHETIAKPPAMSSHY

SEQ ID NO: 266 - protein, 80 aa, Homo sapiens
IKTQESLTLEDVAVEFSWEEWQLLDTAQKNLYRDVMVENYNHLVSLGYQTSKPDVLSKLAHGQEPWTTDAKIQNKNCPGI

SEQ ID NO: 267 - protein, 80 aa, Homo sapiens
PAHVPGEAGPRRTRESRPGAVSFADVAVYFSPEEWECLRPAQRALYRDVMRETFGHLGALGFSVPKPAFISWVEGEVEAW

SEQ ID NO: 268 - protein, 80 aa, Homo sapiens
GCPGDQVTPTRSLTAQLQETMTFKDVEVTFSQDEWGWLDSAQRNLYRDVMLENYRNMASLVGPFTKPALISWLEAREPWG

SEQ ID NO: 269 - protein, 80 aa, Homo sapiens
ARDLVMFRDVAVDFSQEEWECLNSYQRNLYRDVILENYSNLVSLAGCSISKPDVITLLEQGKEPWMVVRDEKRRWTLDLE

SEQ ID NO: 270 - protein, 80 aa, Homo sapiens
TTLKEAVTFKDVAVVFTEEELRLLDLAQRKLYREVMLENFRNLLSVGHQSLHRDTFHFLKEEKFWMMETATQREGNLGGK

SEQ ID NO: 271 - protein, 80 aa, Homo sapiens
SPPSPRSSMAAVALRDSAQGMTFEDVAIYFSQEEWELLDESQRFLYCDVMLENFAHVTSLGYCHGMENEAIASEQSVSIQ

SEQ ID NO: 272 - protein, 80 aa, Homo sapiens
DEEAQKRKAKESGMALPQGRLTFMDVAIEFSQEEWKSLDPGQRALYRDVMLENYRNLVFLGICLPDLSIISMLKQRREPL

SEQ ID NO: 273 - protein, 80 aa, Homo sapiens
ALTQGPLKFMDVAIEFSQEEWKCLDPAQRTLYRDVMLENYRNLVSLGICLPDLSVTSMLEQKRDPWTLQSEEKIANDPDG

SEQ ID NO: 274 - protein, 80 aa, Homo sapiens
TMFKEAVTFKDVAVVFTEEELGLLDVSQRKLYRDVMLENFRNLLSVGHQLSHRDTFHFQREEKFWIMETATQREGNSGGK

SEQ ID NO: 275 - protein, 80 aa, Homo sapiens
QGTVAFEDVAVNFSQEEWSLLSEVQRCLYHDVMLENWVLISSLGCWCGSEDEEAPSKKSISIQRVSQVSTPGAGVSPKKA

SEQ ID NO: 276 - protein, 80 aa, Homo sapiens
AEAFGDSEEDGEDVFEVEKILDMKTEGGKVLYKVRWKGYTSDDDTWEPEIHLEDCKEVLLEFRKKIAENKAKAVRKDIQR

SEQ ID NO: 277 - protein, 80 aa, Homo sapiens
VLQMQNSEHHGQSIKTQTDSISLEDVAVNFTLEEWALLDPGQRNIYRDVMRATFKNLACIGEKWKDQDIEDEHKNQGRNL

SEQ ID NO: 278 - protein, 80 aa, Homo sapiens
AMALTDPAQVSVTFDDVAVTFTQEEWGQLDLAQRTLYQEVMLENCGLLVSLGCPVPRPELIYHLEHGQEPWTRKEDLSQG

SEQ ID NO: 279 - protein, 80 aa, Homo sapiens
VHGSVTFRDVAIDFSQEEWECLQPDQRTLYRDVMLENYSHLISLGSSISKPDVITLLEQEKEPWIVVSKETSRWYPDLES

SEQ ID NO: 280 - protein, 80 aa, Homo sapiens
DPVACEDVAVNFTQEEWALLDISQRKLYREVMLETFRNLTSIGKKWKDQNIEYEYQNPRRNFRSLIEGNVNEIKEDSHCG

SEQ ID NO: 281 - protein, 80 aa, Homo sapiens
IKFQERVTFKDVAVVFTKEELALLDKAQINLYQDVMLENFRNLMLVRDGIKNNILNLQAKGLSYLSQEVLHCWQIWKQRI

SEQ ID NO: 282 - protein, 80 aa, Homo sapiens
GPLTFRDVAIEFSLKEWQCLDTAQRNLYRNVMLENYRNLVFLGITVSKPDLITCLEQGKEAWSMKRHEIMVAKPTVMCSH

SEQ ID NO: 283 - protein, 80 aa, Homo sapiens
TMSKEAVTFKDVAVVFTEEELGLLDLAQRKLYRDVMLENFRNLLSVGHQPFHRDTFHFLREEKFWMMDIATQREGNSGGK

SEQ ID NO: 284 - protein, 80 aa, Homo sapiens
GPLEFRDVAIEFSLEEWHCLDTAQQNLYRDVMLENYRHLVFLGIVVTKPDLITCLEQGKKPFTVKRHEMIAKSPVMCFHF

SEQ ID NO: 285 - protein, 80 aa, Homo sapiens
GHTEGGELVNELLKSWLKGLVTFEDVAVEFTQEEWALLDPAQRTLYRDVMLENCRNLASLGNQVDKPRLISQLEQEDKVM

SEQ ID NO: 286 - protein, 80 aa, Homo sapiens
AEPASVTVTFDDVALYFSEQEWEILEKWQKQMYKQEMKTNYETLDSLGYAFSKPDLITWMEQGRMLLISEQGCLDKTRRT

SEQ ID NO: 287 - protein, 80 aa, Homo sapiens
HSQASAISQDREEKIMSQEPLSFKDVAVVFTEEELELLDSTQRQLYQDVMQENFRNLLSVGERNPLGDKNGKDTEYIQDE

SEQ ID NO: 288 - protein, 80 aa, Homo sapiens
GSLEEGRRATGLPAAQVQEPVTFKDVAVDFTQEEWGQLDLVQRTLYRDVMLETYGHLLSVGNQIAKPEVISLLEQGEEPW

SEQ ID NO: 289 - protein, 80 aa, Homo sapiens
TTFKEAVTFKDVAVVFTEEELGLLDPAQRKLYRDVMLENFRNLLSVGHQPFHQDTCHFLREEKFWMMGTATQREGNSGGK

SEQ ID NO: 290 - protein, 80 aa, Homo sapiens
AKLYEAVTFKDVAVIFTEEELGLLDPAQRKLYRDVMLENFRNLLSVGGKIQTEMETVPEAGTHEEFSCKQIWEQIASDLT

SEQ ID NO: 291 - protein, 80 aa, Homo sapiens
RSDLFLPDSQTNEERKQYDSVAFEDVAVNFTQEEWALLGPSQKSLYRDVMWETIRNLDCIGMKWEDTNIEDQHRNPRRSL

SEQ ID NO: 292 - protein, 80 aa, Homo sapiens
PGTPGSLEMGLLTFRDVAIEFSPEEWQCLDTAQQNLYRNVMLENYRNLAFLGIALSKPDLITYLEQGKEPWNMKQHEMVD

SEQ ID NO: 293 - protein, 80 aa, Homo sapiens
TPGVRVSTDPEQVTFEDVVVGFSQEEWGQLKPAQRTLYRDVMLDTFRLLVSVGHWLPKPNVISLLEQEAELWAVESRLPQ

SEQ ID NO: 294 - protein, 80 aa, Homo sapiens
EQTQAAGMVAGWLINCYQDAVTFDDVAVDFTQEEWTLLDPSQRDLYRDVMLENYENLASVEWRLKTKGPALRQDRSWFRA

SEQ ID NO: 295 - protein, 80 aa, Homo sapiens
PSEANSIQSANATTKTSETNHTSRPRLKNVDRSTAQQLAVTVGNVTVIITDFKEKTRSSSTSSSTVTSSAGSEQQNQSSS

SEQ ID NO: 296 - protein, 80 aa, Homo sapiens
ALTQGQLSFSDVAIEFSQEEWKCLDPGQKALYRDVMLENYRNLVSLGEDNVRPEACICSGICLPDLSVTSMLEQKRDPWT

SEQ ID NO: 297 - protein, 80 aa, Homo sapiens
AAAAALRAPAQSSVTFEDVAVNFSLEEWSLLNEAQRCLYRDVMLETLTLISSLGCWHGGEDEAAPSKQSTCIHIYKDQGG

SEQ ID NO: 298 - protein, 80 aa, Homo sapiens
AQGSVSFNDVTVDFTQEEWQHLDHAQKTLYMDVMLENYCHLISVGCHMTKPDVILKLERGEEPWTSFAGHTCLEENWKAE

SEQ ID NO: 299 - protein, 80 aa, Homo sapiens
DPVAFKDVAVNFTQEEWALLDISQRKLYREVMLETFRNLTSLGKRWKDQNIEYEHQNPRRNFRSLIEEKVNEIKDDSHCG

SEQ ID NO: 300 - protein, 80 aa, Homo sapiens
SKDLVTFGDVAVNFSQEEWEWLNPAQRNLYRKVMLENYRSLVSLGVSVSKPDVISLLEQGKEPWMVKKEGTRGPCPDWEY

SEQ ID NO: 301 - protein, 80 aa, Homo sapiens
DSVAFEDVAINFTCEEWALLGPSQKSLYRDVMQETIRNLDCIGMIWQNHDIEEDQYKDLRRNLRCHMVERACEIKDNSQC

SEQ ID NO: 302 - protein, 80 aa, Homo sapiens
GPLTFMDVAIEFCLEEWQCLDIAQQNLYRNVMLENYRNLVFLGIAVSKPDLITCLEQEKEPWEPMRRHEMVAKPPVMCSH

SEQ ID NO: 303 - protein, 80 aa, Homo sapiens
QSNDIARGFERGLEPEKIIGATDSCGDLMFLMKWKDTDEADLVLAKEANVKCPQIVIAFYEERLTWHAYPEDAENKEKET

SEQ ID NO: 304 - protein, 80 aa, Homo sapiens
ALPAKDSAWPWEEKPRYLGPVTFEDVAVLFTEAEWKRLSLEQRNLYKEVMLENLRNLVSLAESKPEVHTCPSCPLAFGSQ

SEQ ID NO: 305 - protein, 80 aa, Homo sapiens
DAKSLTAWSRTLVTFKDVFVDFTREEWKLLDTAQQIVYRNVMLENYKNLVSLGYQLTKPDVILRLEKGEEPWLVEREIHQ

SEQ ID NO: 306 - protein, 80 aa, Homo sapiens
DAVAFEDVAVNFTQEEWALLGPSQKNLYRYVMQETIRNLDCIRMIWEEQNTEDQYKNPRRNLRCHMVERFSESKDSSQCG

SEQ ID NO: 307 - protein, 80 aa, Homo sapiens
EKTKVERMVEDYLASGYQDSVTFDDVAVDFTPEEWALLDTTEKYLYRDVMLENYMNLASVEWEIQPRTKRSSLQQGFLKN

SEQ ID NO: 308 - protein, 80 aa, Homo sapiens
DSVAFEDVDVNFTQEEWALLDPSQKNLYRDVMWETMRNLASIGKKWKDQNIKDHYKHRGRNLRSHMLERLYQTKDGSQRG

SEQ ID NO: 309 - protein, 80 aa, Homo sapiens
IESQEPVTFEDVAVDFTQEEWQQLNPAQKTLHRDVMLETYNHLVSVGCSGIKPDVIFKLEHGKDPWIIESELSRWIYPDR

SEQ ID NO: 310 - protein, 80 aa, Homo sapiens
AVGLCKAMSQGLVTFRDVALDFSQEEWEWLKPSQKDLYRDVMLENYRNLVWLGLSISKPNMISLLEQGKEPWMVERKMSQ

SEQ ID NO: 311 - protein, 80 aa, Homo sapiens
DKVEEEAMAPGLPTACSQEPVTFADVAVVFTPEEWVFLDSTQRSLYRDVMLENYRNLASVADQLCKPNALSYLEERGEQW

SEQ ID NO: 312 - protein, 80 aa, Homo sapiens
TFEDVAVYFSQEEWGLLDTAQRALYRHVMLENFTLVTSLGLSTSRPRVVIQLERGEEPWVPSGKDMTLARNTYGRLNSGS

SEQ ID NO: 313 - protein, 80 aa, Homo sapiens
AEPPRLPLTFEDVAIYFSEQEWQDLEAWQKELYKHVMRSNYETLVSLDDGLPKPELISWIEHGGEPFRKWRESQKSGNII

SEQ ID NO: 314 - protein, 80 aa, Homo sapiens
DSVVFEDVAVNFTQEEWALLGPSQKKLYRDVMQETFVNLASIGENWEEKNIEDHKNQGRKLRSHMVERLCERKEGSQFGE

SEQ ID NO: 315 - protein, 80 aa, Homo sapiens
AAAALRDPAQGCVTFEDVTIYFSQEEWVLLDEAQRLLYCDVMLENFALIASLGLISFRSHIVSQLEMGKEPWVPDSVDMT

SEQ ID NO: 316 - protein, 80 aa, Homo sapiens
AAPALALVSFEDVVVTFTGEEWGHLDLAQRTLYQEVMLETCRLLVSLGHPVPKPELIYLLEHGQELWTVKRGLSQSTCAG

SEQ ID NO: 317 - protein, 80 aa, Homo sapiens
IKSQESLTLEDVAVEFTWEEWQLLGPAQKDLYRDVMLENYSNLVSVGYQASKPDALFKLEQGEPWTVENEIHSQICPEIK

SEQ ID NO: 318 - protein, 80 aa, Homo sapiens
GESLESRVTLGSLTAESQELLTFKDVSVDFTQEEWGQLAPAHRNLYREVMLENYGNLVSVGCQLSKPGVISQLEKGEEPW

SEQ ID NO: 319 - protein, 80 aa, Homo sapiens
ASVALEDVAVNFTREEWALLGPCQKNLYKDVMQETIRNLDCVGMKWKDQNIEDQYRYPRKNLRCRMLERFVESKDGTQCG

SEQ ID NO: 320 - protein, 80 aa, Homo sapiens
TESQGTVTFKDVAIDFTQEEWKRLDPAQRKLYRNVMLENYNNLITVGYPFTKPDVIFKLEQEEEPWVMEEEVLRRHWQGE

SEQ ID NO: 321 - protein, 80 aa, Homo sapiens
DSVASEDVAVNFTLEEWALLDPSQKKLYRDVMRETFRNLACVGKKWEDQSIEDWYKNQGRILRNHMEEGLSESKEYDQCG

SEQ ID NO: 322 - protein, 80 aa, Homo sapiens
EETQGELTSSCGSKTMANVSLAFRDVSIDLSQEEWECLDAVQRDLYKDVMLENYSNLVSLGYTIPKPDVITLLEQEKEPW

SEQ ID NO: 323 - protein, 80 aa, Homo sapiens
AAILLTTRPKVPVSFEDVSVYFTKTEWKLLDLRQKVLYKRVMLENYSHLVSLGFSFSKPHLISQLERGEGPWVADIPRTW

SEQ ID NO: 324 - protein, 80 aa, Homo sapiens
KDKVEKEKSEKETTSKKNSHKKTRPRLKNVDRSSAQHLEVTVGDLTVIITDFKEKTKSPPASSAASADQHSQSGSSSDNT

SEQ ID NO: 325 - protein, 80 aa, Homo sapiens
GPLTFTDVAIKFSLEEWQFLDTAQQNLYRDVMLENYRNLVFLGVGVSKPDLITCLEQGKEPWNMKRHKMVAKPPVVCSHF

SEQ ID NO: 326 - protein, 80 aa, Homo sapiens
RKPNPQAMAALFLSAPPQAEVTFEDVAVYLSREEWGRLGPAQRGLYRDVMLETYGNLVSLGVGPAGPKPGVISQLERGDE

SEQ ID NO: 327 - protein, 80 aa, Homo sapiens
LSLSPILLYTCEMFQDPVAFKDVAVNFTQEEWALLDISQKNLYREVMLETFWNLTSIGKKWKDQNIEYEYQNPRRNFRSV

SEQ ID NO: 328 - protein, 80 aa, Homo sapiens
AAGEPRSLLFFQKPVTFEDVAVNFTQEEWDCLDASQRVLYQDVMSETFKNLTSVARIFLHKPELITKLEQEEEQWRETRV

SEQ ID NO: 329 - protein, 80 aa, Homo sapiens
AAMPLKAQYQEMVTFEDVAVHFTKTEWTGLSPAQRALYRSVMLENFGNLTALGYPVPKPALISLLERGDMAWGLEAQDDP

SEQ ID NO: 330 - protein, 80 aa, Homo sapiens
ARVPLTFSDVAIDFSQEEWEYLNSDQRDLYRDVMLENYTNLVSLDFNFTTESNKLSSEKRNYEVNAYHQETWKRNKTFNL

SEQ ID NO: 331 - protein, 80 aa, Homo sapiens
ASRLPTAWSCEPVTFEDVTLGFTPEEWGLLDLKQKSLYREVMLENYRNLVSVEHQLSKPDVVSQLEEAEDFWPVERGIPQ

SEQ ID NO: 332 - protein, 80 aa, Homo sapiens
SKKKRDAADKPRGFARGLDPERIIGATDSSGELMFLMKWKDSDEADLVLAKEANMKCPQIVIAFYEERLTWHSCPEDEAQ

SEQ ID NO: 333 - protein, 80 aa, Homo sapiens
AHKYVGLQYHGSVTFEDVAIAFSQQEWESLDSSQRGLYRDVMLENYRNLVSMGHSRSKPHVIALLEQWKEPEVTVRKDGR

SEQ ID NO: 334 - protein, 80 aa, Homo sapiens
AAARLLPVPAGPQPLSFQAKLTFEDVAVLLSQDEWDRLCPAQRGLYRNVMMETYGNVVSLGLPGSKPDIISQLERGEDPW

SEQ ID NO: 335 - protein, 80 aa, Homo sapiens
AVGLLKAMYQELVTFRDVAVDFSQEEWDCLDSSQRHLYSNVMLENYRILVSLGLCFSKPSVILLLEQGKAPWMVKRELTK

SEQ ID NO: 336 - protein, 80 aa, Homo sapiens
GLLTFRDVAIEFSLEEWQCLDTAQRNLYKNVILENYRNLVFLGIAVSKQDLITCLEQEKEPLTVKRHEMVNEPPVMCSHF

SEQ ID NO: 337 - protein, 80 aa, Homo sapiens
GLLAFRDVALEFSPEEWECLDPAQRSLYRDVMLENYRNLISLGEDSFNMQFLFHSLAMSKPELIICLEARKEPWNVNTEK

SEQ ID NO: 338 - protein, 80 aa, Homo sapiens
NLTEGRVVFEDVAIYFSQEEWGHLDEAQRLLYRDVMLENLALLSSLGSWHGAEDEEAPSQQGFSVGVSEVTASKPCLSSQ

SEQ ID NO: 339 - protein, 80 aa, Homo sapiens
GPAQHTSWPCGSAVPTLKSMVTFEDVAVYFSQEEWELLDAAQRHLYHSVMLENLELVTSLGSWHGVEGEGAHPKQNVSVE

SEQ ID NO: 340 - protein, 80 aa, Homo sapiens
SGYPGAERNLLEYSYFEKGPLTFRDVVIEFSQEEWQCLDTAQQDLYRKVMLENFRNLVFLGIDVSKPDLITCLEQGKDPW

SEQ ID NO: 341 - protein, 80 aa, Homo sapiens
ARKLVMFRDVAIDFSQEEWECLDSAQRDLYRDVMLENYSNLVSLDLPSRCASKDLSPEKNTYETELSQWEMSDRLENCDL

SEQ ID NO: 342 - protein, 80 aa, Homo sapiens
GPLQFRDVAIEFSLEEWHCLDTAQRNLYRNVMLENYSNLVFLGITVSKPDLITCLEQGRKPLTMKRNEMIAKPSVMCSHF

SEQ ID NO: 343 - protein, 80 aa, Homo sapiens
VAGWLTNYSQDSVTFEDVAVDFTQEEWTLLDQTQRNLYRDVMLENYKNLVAVDWESHINTKWSAPQQNFLQGKTSSVVEM

SEQ ID NO: 344 - protein, 80 aa, Homo sapiens
AAAWMAPAQESVTFEDVAVTFTQEEWGQLDVTQRALYVEVMLETCGLLVALGDSTKPETVEPIPSHLALPEEVSLQEQLA

SEQ ID NO: 345 - protein, 80 aa, Homo sapiens
VLEWLFISQEQPKITKSWGPLSFMDVFVDFTWEEWQLLDPAQKCLYRSVMLENYSNLVSLGYQHTKPDIIFKLEQGEELC

SEQ ID NO: 346 - protein, 80 aa, Homo sapiens
AAAVLMDRVQSCVTFEDVFVYFSREEWELLEEAQRFLYRDVMLENFALVATLGFWCEAEHEAPSEQSVSVEGVSQVRTAE

SEQ ID NO: 347 - protein, 80 aa, Homo sapiens
AGSQFPDFKHLGTFLVFEELVTFEDVLVDFSPEELSSLSAAQRNLYREVMLENYRNLVSLGHQFSKPDIISRLEEEESYA

SEQ ID NO: 348 - protein, 80 aa, Homo sapiens
IQSQISFEDVAVDFTLEEWQLLNPTQKNLYRDVMLENYSNLVFLEVWLDNPKMWLRDNQDNLKSMERGHKYDVFGKIFNS

SEQ ID NO: 349 - protein, 80 aa, Homo sapiens
DLVAFEDVAVNFTQEEWSLLDPSQKNLYREVMQETLRNLASIGEKWKDQNIEDQYKNPRNNLRSLLGERVDENTEENHCG

SEQ ID NO: 350 - protein, 80 aa, Homo sapiens
KDEDIKLRVIGQDSSEIHFKVKMTTPLKKLKKSYCQRQGVPVNSLRFLFEGQRIADNHTPEELGMEEEDVIEVYQEQIGG

SEQ ID NO: 351 - protein, 80 aa, Homo sapiens
DSVAFEDVAVNFTQEEWALLSPSQKNLYRDVTLETFRNLASVGIQWKDQDIENLYQNLGIKLRSLVERLCGRKEGNEHRE

SEQ ID NO: 352 - protein, 80 aa, Homo sapiens
RNFWILRLPPGSKGEAPKVPVTFDDVAVYFSELEWGKLEDWQKELYKHVMRGNYETLVSLDYAISKPDILTRIERGEEPC

SEQ ID NO: 353 - protein, 80 aa, Homo sapiens
AAAAPRRPTQQGTVTFEDVAVNFSQEEWCLLSEAQRCLYRDVMLENLALISSLGCWCGSKDEEAPCKQRISVQRESQSRT

SEQ ID NO: 354 - protein, 80 aa, Homo sapiens
SGEDSGSFYSWQKAKREQGLVTFEDVAVDFTQEEWQYLNPPQRTLYRDVMLETYSNLVFVGQQVTKPNLILKLEVEECPA

SEQ ID NO: 355 - protein, 80 aa, Homo sapiens
DSVAFEDVAVNFTQEEWALLGPSQKSLYRNVMQETIRNLDCIEMKWEDQNIGDQCQNAKRNLRSHTCEIKDDSQCGETFG

SEQ ID NO: 356 - protein, 80 aa, Homo sapiens
AAGWLTTWSQNSVTFQEVAVDFSQEEWALLDPAQKNLYKDVMLENFRNLASVGYQLCRHSLISKVDQEQLKTDERGILQG

SEQ ID NO: 357 - protein, 80 aa, Homo sapiens
ENPRNQLMALMLLTAQPQELVMFEEVSVCFTSEEWACLGPIQRALYWDVMLENYGNVTSLEWETMTENEEVTSKPSSSQR

SEQ ID NO: 358 - protein, 80 aa, Homo sapiens
LETYNSLVSLQELVSFEEVAVHFTWEEWQDLDDAQRTLYRDVMLETYSSLVSLGHCITKPEMIFKLEQGAEPWIVEETPN

SEQ ID NO: 359 - protein, 80 aa, Homo sapiens
RHFRRPEPCREPLASPIQDSVAFEDVAVNFTQEEWALLDSSQKNLYREVMQETCRNLASVGSQWKDQNIEDHFEKPGKDI

SEQ ID NO: 360 - protein, 80 aa, Homo sapiens
AAAELTAPAQGIVTFEDVAVYFSWKEWGLLDEAQKCLYHDVMLENLTLTTSLGGSGAGDEEAPYQQSTSPQRVSQVRIPK

SEQ ID NO: 361 - protein, 80 aa, Homo sapiens
AATFQLPGHQEMPLTFQDVAVYFSQAEGRQLGPQQRALYRDVMLENYGNVASLGFPVPKPELISQLEQGKELWVLNLLGA

SEQ ID NO: 362 - protein, 80 aa, Homo sapiens
RSEAGEPPSSLQVKPETPASAAVAVAAAAAPTTTAEKPPAEAQDEPAESLSEFKPFFGNIIITDVTANCLTVTFKEYVTV

SEQ ID NO: 363 - protein, 80 aa, Homo sapiens
HRTTRIKITELNPHLMCALCGGYFIDATTIVECLHSFCKTCIVRYLETNKYCPMCDVQVHKTRPLLSIRSDKTLQDIVYK

SEQ ID NO: 364 - protein, 80 aa, Homo sapiens
ASQEFEVEAIVDKRQDKNGNTQYLVRWKGYDKQDDTWEPEQHLMNCEKCVHDFNRRQTEKQKKLTWTTTSRIFSNNARRR

SEQ ID NO: 365 - protein, 80 aa, Homo sapiens
ASGDLYEVERIVDKRKNKKGKWEYLIRWKGYGSTEDTWEPEHHLLHCEEFIDEFNGLHMSKDKRIKSGKQSSTSKLLRDS

SEQ ID NO: 366 - protein, 80 aa, Homo sapiens
TLIRKADLENHNKDGGFWTVIDGKVYDIKDFQTQSLTGNSILAQFAGEDPVVALEAALQFEDTRESMHAFCVGQYLEPDQ

SEQ ID NO: 367 - protein, 80 aa, Homo sapiens
EKTKIGTMVEDHRSNSYQDSVTFDDVAVEFTPEEWALLDTTQKYLYRDVMLENYMNLASVDFFFCLTSEWEIQPRTKRSS

SEQ ID NO: 368 - protein, 80 aa, Homo sapiens
AHELVMFRDVAIDVSQEEWECLNPAQRNLYKEVMLENYSNLVSLGLSVSKPAVISSLEQGKEPWMVVREETGRWCPGTWK

SEQ ID NO: 369 - protein, 80 aa, Homo sapiens
AFEDVAVYFSQEEWGLLDTAQRALYRRVMLDNFALVASLGLSTSRPRVVIQLERGEEPWVPSGTDTTLSRTTYRRRNPGS

SEQ ID NO: 370 - protein, 80 aa, Homo sapiens
AQLRRGHLTFRDVAIEFSQEEWKCLDPVQKALYRDVMLENYRNLVSLGICLPDLSIISMMKQRTEPWTVENEMKVAKNPD

SEQ ID NO: 371 - protein, 80 aa, Homo sapiens
SDHSLGISRSKTPVDDPMSLLYNMNDCYSKLKELVPSIPQNKKVSKMEILQHVIDYILDLQIALDSHPTIVSLHHQRPGQ

SEQ ID NO: 372 - protein, 80 aa, Homo sapiens
KDPNEPQKPVSAYALFFRDTQAAIKGQNPNATFGEVSKIVASMWDGLGEEQKQVYKKKTEAAKKEYLKQLAAYRASLVSK

SEQ ID NO: 373 - protein, 80 aa, Homo sapiens
QEEKQEDAAICPVTVLPEEPVTFQDVAVDFSREEWGLLGPTQRTEYRDVMLETFGHLVSVGWETTLENKELAPNSDIPEE

SEQ ID NO: 374 - protein, 80 aa, Homo sapiens
DASRLSGRDPSSWTVEDVMQFVREADPQLGPHADLFRKHEIDGKALLLLRSDMMMKYMGLKLGPALKLSYHIDRLKQGKF

SEQ ID NO: 375 - protein, 80 aa, Homo sapiens
AVTFEDVTIIFTWEEWKFLDSSQKRLYREVMWENYTNVMSVENWNESYKSQEEKFRYLEYENFSYWQGWWNAGAQMYENQ

SEQ ID NO: 376 - protein, 80 aa, Homo sapiens
ELSAIGEQVFAVESIRKKRVRKGKVEYLVKWKGWPPKYSTWEPEEHILDPRLVMAYEEKEERDRASGYRKRGPKPKRLLL

SEQ ID NO: 377 - protein, 80 aa, Homo sapiens
GGAGARLPALLDEQQVNVLLYDMNGCYSRLKELVPTLPQNRKVSKVEILQHVIDYIRDLQLELNSESEVGTPGGRGLPVR

SEQ ID NO: 378 - protein, 80 aa, Homo sapiens
VVMAASPGSLHSPQQLAEEATRKRELRLMKNREAAKECRRRKKEYVKCLESRVAVLEVQNKKLIEELETLKDICSPKTDY

SEQ ID NO: 379 - protein, 80 aa, Homo sapiens
GGGPGGRPGREPRQRHTANARERDRTNSVNTAFTALRTLIPTEPADRKLSKIETLRLASSYISHLGNVLLAGEACGDGQP

SEQ ID NO: 380 - protein, 80 aa, Homo sapiens
SGFGYSLPQQQPAAVARRNERERNRVKLVNLGFATLREHVPNGAANKKMSKVETLRSAVEYIRALQQLLDEHDAVSAAFQ

SEQ ID NO: 381 - protein, 80 aa, Homo sapiens
APLPPRDPNGAGPEWREPGAVSFADVAVYFCREEWGCLRPAQRALYRDVMRETYGHLSALGIGGNKPALISWVEEEAELW

SEQ ID NO: 382 - protein, 80 aa, Homo sapiens
KQGFSKDPSTWSVDEVIQFMKHTDPQISGPLADLFRQHEIDGKALFLLKSDVMMKYMGLKLGPALKLCYYIEKLKEGKYS

SEQ ID NO: 383 - protein, 80 aa, Homo sapiens
SGGGSPQSYEELQTQRVMANVRERQRTQSLNEAFAALRKIIPTLPSDKLSKIQTLKLAARYIDFLYQVLQSDELDSKMAS

SEQ ID NO: 384 - protein, 80 aa, Homo sapiens
IAPGVVMASSPALPTQPAEEAARKREVRLMKNREAARECRRKKKEYVKCLENRVAVLENQNKTLIEELKALKDLYCHKSD

SEQ ID NO: 385 - protein, 80 aa, Homo sapiens
SRIPVSKSQPVTPEKHRARKRQAWLWEEDKNLRSGVRKYGEGNWSKILLHYKFNNRTSVMLKDRWRTMKKLKLISSDSED

SEQ ID NO: 386 - protein, 80 aa, Homo sapiens
SLAIARGRGKGPAAEEPLSLLDDMNHCYSRLRELVPGVPRGTQLSQVEILQRVIDYILDLQVVLAEPAPGPPDGPHLPIQ

SEQ ID NO: 387 - protein, 80 aa, Homo sapiens
GSGPPSSGGGLYRDMGAQGGRPSLIARIPVARILGDPEEESWSPSLTNLEKVVVTDVTSNFLTVTIKESNTDQGFFKEKR

SEQ ID NO: 388 - protein, 80 aa, Homo sapiens
ELPAVGEHVFAVESIEKKRIRKGRVEYLVKWRGWSPKYNTWEPEENILDPRLLIAFQNRERQEQLMGYRKRGPKPKPLVV

SEQ ID NO: 389 - protein, 80 aa, Homo sapiens
VDSSSNQLPSSKRMRTAFTSTQLLELEREFASNMYLSRLRRIEIATYLNLSEKQVKIWFQNRRVKHKKEGKGSNHRGGGG

SEQ ID NO: 390 - protein, 80 aa, Homo sapiens
TPGGGGDAGKKRKRRVLFSKAQTYELERRFRQQRYLSAPEREHLASLIRLTPTQVKIWFQNHRYKMKRARAEKGMEVTPL

SEQ ID NO: 391 - protein, 80 aa, Homo sapiens
QTVVMTSPVTLTSQTTKTDDPQLKREIRLMKNREAARECRRKKKEYVKCLENRVAVLENQNKTLIEELKTLKDLYSNKSV

SEQ ID NO: 392 - protein, 80 aa, Homo sapiens
KGSPSAQSFEELQSQRILANVRERQRTQSLNEAFAALRKIIPTLPSDKLSKIQTLKLAARYIDFLYQVLQSDEMDNKMTS

SEQ ID NO: 393 - protein, 80 aa, Homo sapiens
NLTEDYMVFEDVAIHFSQEEWGILNDVQRHLHSDVMLENFALLSSVGCWHGAKDEEAPSKQCVSVGVSQVTTLKPALSTQ

SEQ ID NO: 394 - protein, 80 aa, Homo sapiens
KDPNEPQKPVSAYALFFRDTQAAIKGQNPNATFGEVSKIVASMWDSLGEEQKQVYKRKTEAAKKEYLKALAAYRASLVSK

SEQ ID NO: 395 - protein, 80 aa, Homo sapiens
KDPNEPQKPVSAYALFFRDTQAAIKGQNPNATFGEVSKIVASMWDSLGEEQKQVYKRKTEAAKKEYLKALAAYKDNQECQ

SEQ ID NO: 396 - protein, 80 aa, Homo sapiens
LDGSTWDFCSEDCKSKYLLWYCKAARCHACKRQGKLLETIHWRGQIRHFCNQQCLLRFYSQQNQPNLDTQSGPESLLNSQ

SEQ ID NO: 397 - protein, 80 aa, Homo sapiens
ASVQASRRQWCYLCDLPKMPWAMVWDFSEAVCRGCVNFEGADRIELLIDAARQLKRSHVLPEGRSPGPPALKHPATKDLA

SEQ ID NO: 398 - protein, 80 aa, Homo sapiens
MEGPQPENMQPRTRRTKFTLLQVEELESVFRHTQYPDVPTRRELAENLGVTEDKVRVWFKNKRARCRRHQRELMLANELR

SEQ ID NO: 399 - protein, 80 aa, Homo sapiens
PKIMPKKPAEEGNDSEEVPEASGPQNDGKELCPPGKPTTSEKIHERSGPKRGEHAWTHRLRERKQLVIYEEISDPEEDDE

SEQ ID NO: 400 - protein, 80 aa, Homo sapiens
SAAQVSSSRRQSCYLCDLPRMPWAMIWDFSEPVCRGCVNYEGADRIEFVIETARQLKRAHGCFQDGRSPGPPPPVGVKTV

SEQ ID NO: 401 - protein, 80 aa, Homo sapiens
PGPPGSLEMGPLTFRDVAIEFSLEEWQCLDTAQRNLYRKVMFENYRNLVFLGIAVSKPHLITCLEQGKEPWNRKRQEMVA

SEQ ID NO: 402 - protein, 80 aa, Homo sapiens
NKKKVEEVLEEEEEEYVVEKVLDRRVVKGKVEYLLKWKGFSDEDNTWEPEENLDCPDLIAEFLQSQKTAHETDKSEGGKR

SEQ ID NO: 403 - protein, 80 aa, Homo sapiens
LANVVEKVRLLRLHPGMGLKGDLCERHGEKLKMFCKEDVLIMCEACSQSPEHEAHSVVPMEDVAWEYKWELHEALEHLKK

SEQ ID NO: 404 - protein, 80 aa, Homo sapiens [sequence omitted]

SEQ ID NO: 405 - protein, 80 aa, Homo sapiens
ENSDLLPVAQTEPSIWTVDDVWAFIHSLPGCQDIADEFRAQEIDGQALLLLKEDHLMSAMNIKLGPALKICARINSLKES

SEQ ID NO: 406 - protein, 80 aa, Homo sapiens
AGPGGGSRSGSGRPAAANAARERSRVQTLRHAFLELQRTLPSVPPDTKLSKLDVLLLATTYIAHLTRSLQDDAEAPADAG

SEQ ID NO: 407 - protein, 80 aa, Homo sapiens
QNGKSKKVEEAEPEEFVVEKVLDRRVVNGKVEYFLKWKGFTDADNTWEPEENLDCPELIEAFLNSQKAGKEKDGTKRKSL

SEQ ID NO: 408 - protein, 80 aa, Homo sapiens
QHPPDACAFRRGRKKRIPYSKGQLRELEREYAANKFITKDKRRKISAATSLSERQITIWFQNRRVKEKKVLAKVKNSATP

SEQ ID NO: 409 - protein, 80 aa, Homo sapiens
SMSPTTSSQILARKRRRGIIEKRRRDRINNSLSELRRLVPSAFEKQGSAKLEKAEILQMTVDHLKMLHTAGGKGYFDAHA

SEQ ID NO: 410 - protein, 80 aa, Homo sapiens
LVGMGHHFLPSEPTKWNVEDVYEFIRSLPGCQEIAEEFRAQEIDGQALLLLKEDHLMSAMNIKLGPALKIYARISMLKDS

SEQ ID NO: 411 - protein, 80 aa, Homo sapiens
PANEDAPQPGEHGSACEVSVSFEDVTVDFSREEWQQLDSTQRRLYQDVMLENYSHLLSVGFEVPKPEVIFKLEQGEGPWT

SEQ ID NO: 412 - protein, 80 aa, Homo sapiens
GYSSTENLQLVLERRRVANAKERERIKNLNRGFARLKALVPFLPQSRKPSKVDILKGATEYIQVLSDLLEGAKDSKKQDP

SEQ ID NO: 413 - protein, 80 aa, Homo sapiens
EEAPAPEDVTKWTVDDVCSFVGGLSGCGEYTRVFREQGIDGETLPLLTEEHLLTNMGLKLGPALKIRAQVARRLGRVFYV

SEQ ID NO: 414 - protein, 80 aa, Homo sapiens
GGTLAHTPRRSLPSHHGKKMRMARCGHCRGCLRVQDCGSCVNCLDKPKFGGPNTKKQCCVYRKCDKIEARKMERLAKKGR

SEQ ID NO: 415 - protein, 80 aa, Homo sapiens
LNSPTTTSQIMARKKRRGIIEKRRRDRINNSLSELRRLVPTAFEKQGSAKLEKAEILQMTVDHLKMLQATGGKGYFDAHA

SEQ ID NO: 416 - protein, 80 aa, Homo sapiens
QPVKSELDEEEERRKRRREKNKVAAARCRNKKKERTEFLQRESERLELMNAELKTQIEELKQERQQLILMLNRHRPTCIV

SEQ ID NO: 417 - protein, 80 aa, Homo sapiens
LQPEVSSYRRGRKKRVPYTKVQLKELEKEYAASKFITKEKRRRISATTNLSERQVTIWFQNRRVKEKKVVSKSKAPHLHS

SEQ ID NO: 418 - protein, 80 aa, Homo sapiens
LPVPLDSAFEPAFLRKRNERERQRVRCVNEGYARLRDHLPRELADKRLSKVETLRAAIDYIKHLQELLERQAWGLEGAAG

SEQ ID NO: 419 - protein, 80 aa, Homo sapiens
SPFLQRPLHKRKGGQVRFSNDQTIELEKKFETQKYLSPPERKRLAKMLQLSERQVKTWFQNRRAKWRRLKQENPQSNKKE

SEQ ID NO: 420 - protein, 80 aa, Homo sapiens
IAIATGSLHCVCCTEDGEVYTWGDNDEGQLGDGTTNAIQRPRLVAALQGKKVNRVACGSAHTLAWSTSKPASAGKLPAQV

SEQ ID NO: 421 - protein, 80 aa, Homo sapiens
GGSDASQVPNGKRMRTAFTSTQLLELEREFSSNMYLSRLRRIEIATYLNLSEKQVKIWFQNRRVKHKKEGKGTQRNSHAG

SEQ ID NO: 422 - protein, 80 aa, Homo sapiens
RLDLPPGFMFKVQAQHDYTATDTDELQLKAGDVVLVIPFQNPEEQDEGWLMGVKESDWNQHKELEKCRGVFPENFTERVP

SEQ ID NO: 423 - protein, 80 aa, Homo sapiens
GICKLPGRLRIQPALWSREDVLHWLRWAEQEYSLPCTAEHGFEMNGRALCILTKDDFRHRAPSSGDVLYELLQYIKTQRR

SEQ ID NO: 424 - protein, 80 aa, Homo sapiens
PNYRGCEYSYGPAFTRKRNERERQRVKCVNEGYAQLRHHLPEEYLEKRLSKVETLRAAIKYINYLQSLLYPDKAETKNNP

SEQ ID NO: 425 - protein, 80 aa, Homo sapiens
LHGINPVFLSSNPSRWSVEEVYEFIASLQGCQEIAEEFRSQEIDGQALLLLKEEHLMSAMNIKLGPALKICAKINVLKET

SEQ ID NO: 426 - protein, 80 aa, Homo sapiens
QAGQQQGQQKQKRHRTRFTPAQLNELERSFAKTHYPDIFMREELALRIGLTESRVQVWFQNRRAKWKKRKKTTNVFRAPG

SEQ ID NO: 427 - protein, 80 aa, Homo sapiens
AAAVAVAAASRRQSCYLCDLPRMPWAMIWDFTEPVCRGCVNYEGADRVEFVIETARQLKRAHGCFPEGRSPPGAAASAAA

SEQ ID NO: 428 - protein, 80 aa, Homo sapiens
FSSQTPASIKEEEGSPEKERPPEAEYINSRCVLFTYFQGDISSVVDEHFSRALSQPSSYSPSCTSSKAPRSSGPWRDCSF

SEQ ID NO: 429 - protein, 80 aa, Homo sapiens
DKAGGSSGQRTRKKRCPYTKYQIRELEREFFFSVYINKEKRLQLSRMLNLTDRQVKIWFQNRRMKEKKINRDRLQYYSAN

SEQ ID NO: 430 - protein, 80 aa, Homo sapiens
GAPLSGLQGLPECTRCGHGIVGTIVKARDKLYHPECFMCSDCGLNLKQRGYFFLDERLYCESHAKARVKPPEGYDVVAVY

SEQ ID NO: 431 - protein, 80 aa, Homo sapiens
RRPATAETGGGAAAVARRNERERNRVKLVNLGFQALRQHVPHGGASKKLSKVETLRSAVEYIRALQRLLAEHDAVRNALA

SEQ ID NO: 432 - protein, 80 aa, Homo sapiens
TVQVTGKTRTKEKYRVVYTDHQRLELEKEFHCNRYITIQRKSELAVNLGLSERQVKIWFQNRRAKERKMIKKKISQFENS

SEQ ID NO: 433 - protein, 80 aa, Homo sapiens
EEAAQKRKEKEPGMALPQGHLTFRDVAIEFSLEEWKCLDPTQRALYRAMMLENYRNLHSVDISSKCMMKKFSSTAQGNTE

SEQ ID NO: 434 - protein, 80 aa, Homo sapiens
DIRASQVARWTVDEVAEFVQSLLGCEEHAKCFKKEQIDGKAFLLLTQTDIVKVMKIKLGPALKIYNSILMFRHSQELPEE

SEQ ID NO: 435 - protein, 80 aa, Homo sapiens
LSPLEGTKMTVNNLHPRVTEEDIVELFCVCGALKRARLVHPGVAEVVFVKKDDAITAYKKYNNRCLDGQPMKCNLHMNGN

SEQ ID NO: 436 - protein, 80 aa, Homo sapiens
DNAERPRARRRRKPRVLFSQAQVYELERRFKQQRYLSAPERDQLASVLKLTSTQVKIWFQNRRYKCKRQRQDQTLELVGL

SEQ ID NO: 437 - protein, 80 aa, Homo sapiens
SQVKSKAKKTVDKHSDEYKIRRERNNIAVRKSRDKAKMRNLETQHKVLELTAENERLQKKVEQLSRELSTLRNLFKQLPE

SEQ ID NO: 438 - protein, 80 aa, Homo sapiens
KRDYIRLYGIKCAKCSIGFSKNDFVMRARSKVYHIECFRCVACSRQLIPGDEFALREDGLFCRADHDVVERASLGAGDPL

SEQ ID NO: 439 - protein, 80 aa, Homo sapiens
SLGSQVKTRTKDKYRVVYTDHQRLELEKEFHYSRYITIRRKAELAATLGLSERQVKIWFQNRRAKERKINKKKLQQQQQQ

SEQ ID NO: 440 - protein, 80 aa, Homo sapiens
QGGQRGRPHSRRRHRTTFSPVQLEQLESAFGRNQYPDIWARESLARDTGLSEARIQVWFQNRRAKQRKQERSLLQPLAHL

SEQ ID NO: 441 - protein, 80 aa, Homo sapiens
DALTYLDQVKIRFGSDPATYNGFLEIMKEFKSQSIDTPGVIRRVSQLFHEHPDLIVGFNAFLPLGYRIDIPKNGKLNIQS

SEQ ID NO: 442 - protein, 80 aa, Homo sapiens
RLHLDSNPLKWSVADVVRFIRSTDCAPLARIFLDQEIDGQALLLLTLPTVQECMDLKLGPAIKLCHHIERIKFAFYEQFA

SEQ ID NO: 443 - protein, 80 aa, Homo sapiens
AKGAAPNAPRTRKKRCPYSKFQIRELEREFFFNVYINKEKRLQLSRMLNLTDRQVKIWFQNRRMKEKKLSRDRLQYFSGN

SEQ ID NO: 444 - protein, 80 aa, Homo sapiens
TTGNWLTAKSGRKKRCPYTKHQTLELEKEFLFNMYLTRERRLEISKTINLTDRQVKIWFQNRRMKLKKMNRENRIRELTS

SEQ ID NO: 445 - protein, 80 aa, Homo sapiens
YLVSNVIELLDVDPNDQEEDGANIDLDSQRKGKCAVIKTSTRQTYFLPVIGLVDAEKLKPGDLVGVNKDSYLILETLPTE

SEQ ID NO: 446 - protein, 80 aa, Homo sapiens
KASPTLGKRKKRRHRTVFTAHQLEELEKAFSEAHYPDVYAREMLAVKTELPEDRIQVWFQNRRAKWRKREKRWGGSSVMA

SEQ ID NO: 447 - protein, 80 aa, Homo sapiens
EESERPKPRSRRKPRVLFSQAQVFELERRFKQQRYLSAPEREHLASSLKLTSTQVKIWFQNRRYKCKRQRQDKSLELGAH

SEQ ID NO: 448 - protein, 80 aa, Homo sapiens
VVPGSRQEEVIDHKLTEREWAEEWKHLNNLLNCIMDMVEKTRRSLTVLRRCQEADREELNHWARRYSDAEDTKKGPAPAA

SEQ ID NO: 449 - protein, 80 aa, Homo sapiens
ESPEKKPACRKKKTRTVFSRSQVFQLESTFDMKRYLSSSERAGLAASLHLTETQVKIWFQNRRNKWKRQLAAELEAANLS

SEQ ID NO: 450 - protein, 80 aa, Homo sapiens
RGGVGVGGGRKKKTRTVFSRSQVFQLESTFDLKRYLSSAERAGLAASLQLTETQVKIWFQNRRNKWKRQLAAELEAASLS

SEQ ID NO: 451 - protein, 80 aa, Homo sapiens
ELLAHGRQKILDLLNEGSARDLRSLQRIGPKKAQLIVGWRELHGPFSQVEDLERVEGITGKQMESFLKANILGLAAGQRC

SEQ ID NO: 452 - protein, 80 aa, Homo sapiens
ESPYGETISPEDAPESISKAVASLPPEQMFELMKQMKLCVQNSPQEARNMLLQNPQLAYALLQAQVVMRIVDPEIALKIL

SEQ ID NO: 453 - protein, 80 aa, Homo sapiens
AGPLHKGKKAVNKDSLEYRLRRERNNIAVRKSRDKAKRRILETQQKVLEYMAENERLRSRVEQLTQELDTLRNLFRQIPE

SEQ ID NO: 454 - protein, 80 aa, Homo sapiens
IRIVNGKPKKVRKPRTIYSSFQLAALQRRFQKTQYLALPERAELAASLGLTQTQVKIWFQNRRSKFKKMWKSGEIPSEQH

SEQ ID NO: 455 - protein, 80 aa, Homo sapiens
TVYQFCSPSCWTKFQRTSPEGGIHLSCHYCHSLFSGKPEVLDWQDQVFQFCCRDCCEDFKRLRGVVSQCEHCRQEKLLHE

SEQ ID NO: 456 - protein, 80 aa, Homo sapiens
TMVDTEMPFWPTNFGISSVDLSVMEDHSHSFDIKPFTTVDFSSISTPHYEDIPFTRTDPVVADYKYDLKLQEYQSAIKVE

SEQ ID NO: 457 - protein, 80 aa, Homo sapiens
GRHHAELLKPRCSACDEIIFADECTEAEGRHWHMKHFCCLECETVLGGQRYIMKDGRPFCCGCFESLYAEYCETCGEHIG

SEQ ID NO: 458 - protein, 80 aa, Homo sapiens
DPDKESPGCKRRRTRTNFTGWQLEELEKAFNESHYPDVFMREALALRLDLVESRVQVWFQNRRAKWRKKENTKKGPGRPA

SEQ ID NO: 459 - protein, 80 aa, Homo sapiens
TEQPTPRQKKPRRSRTIFTELQLMGLEKKFQKQKYLSTPDRLDLAQSLGLTQLQVKTWYQNRRMKWKKMVLKGGQEAPTK

SEQ ID NO: 460 - protein, 80 aa, Homo sapiens
SMELAKNKSKKRRNRTTFSTFQLEELEKVFQKTHYPDVYAREQLALRTDLTEARVQVWFQNRRAKWRKRERYGKIQEGRN

SEQ ID NO: 461 - protein, 80 aa, Homo sapiens
GGGGGAGPVVVVRQRQAANARERDRTQSVNTAFTALRTLIPTEPVDRKLSKIETVRLASSYIAHLANVLLLGDSADDGQP

SEQ ID NO: 462 - protein, 80 aa, Homo sapiens
IDDTVEGITGNLFEVYLKPYFLEAYRPIRKGDIFLVRGGMRAVEFKVVETDPSPYCIVAPDTVIHCEGEPIKREDEEESL

SEQ ID NO: 463 - protein, 80 aa, Homo sapiens
SALNQTKKRKKRRHRTIFTSYQLEELEKAFNEAHYPDVYAREMLAMKTELPEDRIQVWFQNRRAKWRKREKCWGRSSVMA

SEQ ID NO: 464 - protein, 80 aa, Homo sapiens
DGLPWGAAPGRARKKRKPYTKQQIAELENEFLVNEFINRQKRKELSNRLNLSDQQVKIWFQNRRMKKKRVVLREQALALY

SEQ ID NO: 465 - protein, 80 aa, Homo sapiens
GGGGSGKTRTKDKYRVVYTDHQRLELEKEFHYSRYITIRRKSELAANLGLTERQVKIWFQNRRAKERKVNKKKQQQQQPP

SEQ ID NO: 466 - protein, 80 aa, Homo sapiens
TRAGGLALGRSEASPENAARERSRVRTLRQAFLALQAALPAVPPDTKLSKLDVLVLAASYIAHLTRTLGHELPGPAWPPF

SEQ ID NO: 467 - protein, 80 aa, Homo sapiens
KCDSNVSSSKKRRHRTTFTSLQLEELEKVFQKTHYPDVYVREQLALRTELTEARVQVWFQNRRAKWRKRERYGQIQQAKS

SEQ ID NO: 468 - protein, 80 aa, Homo sapiens
NAANWLTAKSGRKKRCPYTKHQTLELEKEFLFNMYLTRERRLEISRSVHLTDRQVKIWFQNRRMKLKKMNRENRIRELTA

SEQ ID NO: 469 - protein, 80 aa, Homo sapiens
LSEEEQPKKKHRRNRTTFTTYQLHELERAFEKSHYPDVYSREELAGKVNLPEVRVQVWFQNRRAKWRRQEKLEVSSMKLQ

SEQ ID NO: 470 - protein, 80 aa, Homo sapiens
HMAGLAEYPMQGELASAISSGKKKRKRCGMCAPCRRRINCEQCSSCRNRKTGHQICKFRKCEELKKKPSAALEKVMLPTG

SEQ ID NO: 471 - protein, 80 aa, Homo sapiens
SITKHPSTWSVEAVVLFLKQTDPLALCPLVDLFRSHEIDGKALLLLTSDVLLKHLGVKLGTAVKLCYYIDRLKQGKCFEN

SEQ ID NO: 472 - protein, 80 aa, Homo sapiens
ACRRKREFIPDEKKDAMYWEKRRKNNEAAKRSREKRRLNDLVLENKLIALGEENATLKAELLSLKLKFGLISSTAYAQEI

SEQ ID NO: 473 - protein, 80 aa, Homo sapiens
EIRFNGKGKKIRKPRTIYSSLQLQALNHRFQQTQYLALPERAELAASLGLTQTQVKIWFQNKRSKFKKLLKQGSNPHESD

SEQ ID NO: 474 - protein, 80 aa, Homo sapiens
GLHGTRQEEMIDHRLTDREWAEEWKHLDHLLNCIMDMVEKTRRSLTVLRRCQEADREELNYWIRRYSDAEDLKKGGGSSS

SEQ ID NO: 475 - protein, 80 aa, Homo sapiens
ELSAVGERVFAAEALLKRRIRKGRMEYLVKWKGWSQKYSTWEPEENILDARLLAAFEEREREMELYGPKKRGPKPKTFLL

SEQ ID NO: 476 - protein, 80 aa, Homo sapiens
AREKSAGKRGPDRGSPEYRQRRERNNIAVRKSRDKAKRRNQEMQQKLVELSAENEKLHQRVEQLTRDLAGLRQFFKQLPS

SEQ ID NO: 477 - protein, 80 aa, Homo sapiens
SGGCDNLIKLWKEEEDGQWKEEQKLEAHSDWVRDVAWAPSIGLPTSTIASCSQDGRVFIWTCDDASSNTWSPKLLHKFND

SEQ ID NO: 478 - protein, 80 aa, Homo sapiens
VKGVDLDAPGSINGVPLLEVDLDSFEDKPWRKPGADLSDYFNYGFNEDTWKAYCEKQKRIRMGLEVIPVTSTTNKITAED

SEQ ID NO: 479 - protein, 80 aa, Homo sapiens
KADSESNKGKKRRNRTTFTSYQLEELEKVFQKTHYPDVYAREQLAMRTDLTEARVQVWFQNRRAKWRKRERFGQMQQVRT

SEQ ID NO: 480 - protein, 80 aa, Homo sapiens
TAKQREAEATAKRPRTTITAKQLETLKSAYNTSPKPARHVREQLSSETGLDMRVVQVWFQNRRAKEKRLKKDAGRQRWGQ

SEQ ID NO: 481 - protein, 80 aa, Homo sapiens
GRHHAECLKPRCAACDEIIFADECTEAEGRHWHMKHFCCFECETVLGGQRYIMKEGRPYCCHCFESLYAEYCDTCAQHIG

SEQ ID NO: 482 - protein, 80 aa, Homo sapiens
IIGGDRPDEFLQVKNVLKDGPAAQDGKIAPGDVIVDINGNCVLGHTHADVVQMFQLVPVNQYVNLTLCRGYPLPDDSEDP

SEQ ID NO: 483 - protein, 80 aa, Homo sapiens
CCPECDTRVTSQCLDQNGHKLYRSGDNWTHSCQQCRCLEGEVDCWPLTCPNLSCEYTAILEGECCPRCVSDPCLADNITY

SEQ ID NO: 484 - protein, 80 aa, Homo sapiens
LNSEEKKKRKQRRNRTTFNSSQLQALERVFERTHYPDAFVREDLARRVNLTEARVQVWFQNRRAKFRRNERAMLANKNAS

SEQ ID NO: 485 - protein, 80 aa, Homo sapiens
GLNGGYQDELVDHRLTEREWADEWKHLDHALNCIMEMVEKTRRSMAVLRRCQESDREELNYWKRRYNENTELRKTGTELV

SEQ ID NO: 486 - protein, 80 aa, Homo sapiens
GPGEEAPKKKHRRNRTTFTTYQLHQLERAFEASHYPDVYSREELAAKVHLPEVRVQVWFQNRRAKWRRQERLESGSGAVA

SEQ ID NO: 487 - protein, 80 aa, Homo sapiens
VRMVNGKPKKVRKPRTIYSSYQLAALQRRFQKAQYLALPERAELAAQLGLTQTQVKIWFQNRRSKFKKLYKNGEVPLEHS

SEQ ID NO: 488 - protein, 80 aa, Homo sapiens
EVRFNGKGKKIRKPRTIYSSLQLQALNRRFQQTQYLALPERAELAASLGLTQTQVKIWFQNKRSKFKKLMKQGGAALEGS

SEQ ID NO: 489 - protein, 80 aa, Homo sapiens
GRSEQPKARQRRKPRVLFSQAQVLALERRFKQQRYLSAPEREHLASALQLTSTQVKIWFQNRRYKCKRQRQDKSLELAGH

SEQ ID NO: 490 - protein, 80 aa, Homo sapiens
LPRTLGELQLYRILQKANLLSYFDAFIQQGGDDVQQLCEAGEEEFLEIMALVGMASKPLHVRRLQKALRDWVTNPGLFNQ

SEQ ID NO: 491 - protein, 80 aa, Homo sapiens
NLSLDEDIQKWTVDDVHSFIRSLPGCSDYAQVFKDHAIDGETLPLLTEEHLRGTMGLKLGPALKIQSQVSQHVGSMFYKK

SEQ ID NO: 492 - protein, 80 aa, Homo sapiens
SPEDGSLKKKQRRQRTHFTSQQLQELEATFQRNRYPDMSTREEIAVWTNLTEARVRVWFKNRRAKWRKRERSQQAELCKG

SEQ ID NO: 493 - protein, 80 aa, Homo sapiens
SNLLVSASDDKTLKIWDVSSGKCLKTLKGHSNYVFCCNFNPQSNLIVSGSFDESVRIWDVKTGKCLKTLPAHSDPVSAVH

SEQ ID NO: 494 - protein, 80 aa, Homo sapiens
GNYKSEVNSKPRKERTAFTKEQIRELEAEFAHHNYLTRLRRYEIAVNLDLTERQVKVWFQNRRMKWKRVKGGQQGAAARE

SEQ ID NO: 495 - protein, 80 aa, Homo sapiens
LPRTLGELQLYRVLQRANLLSYYETFIQQGGDDVQQLCEAGEEEFLEIMALVGMATKPLHVRRLQKALREWATNPGLFSQ

SEQ ID NO: 496 - protein, 80 aa, Homo sapiens
PEEPTIGDIYNGKVTSIMQFGCFVQLEGLRKRWEGLVHISELRREGRVANVADVVSKGQRVKVKVLSFTGTKTSLSMKDV

SEQ ID NO: 497 - protein, 80 aa, Homo sapiens
YAFNHPFSINNLMSSEQQHHHSHHHHQPHKMDLKAYEQVMHYPGYGSPMPGSLAMGPVTNKTGLDASPLAADTSYYQGVY

SEQ ID NO: 498 - protein, 80 aa, Homo sapiens
TAAAGPAPPTAPEPAGASSEPEAGDWRPEMSPCSNVVVTDVTSNLLTVTIKEFCNPEDFEKVAAGVAGAAGGGGSIGASK

SEQ ID NO: 499 - protein, 80 aa, Homo sapiens
FLLHNALARKPKRIRTAFSPSQLLRLEHAFEKNHYVVGAERKQLAHSLSLTETQVKVWFQNRRTKFKRQKLEEEGSDSQQ

SEQ ID NO: 500 - protein, 80 aa, Homo sapiens
KRIALYIGNLTWWTTDEDLTEAVHSLGVNDILEIKFFENRANGQSKGFALVGVGSEASSKKLMDLLPKRELHGQNPVVTP

SEQ ID NO: 501 - protein, 80 aa, Homo sapiens
SGAPWYPINSRSRKKRKPYSKLQLAELEGEFLVNEFITRQRRRELSDRLNLSDQQVKIWFQNRRMKKKRLLLREQALSFF

SEQ ID NO: 502 - protein, 80 aa, Homo sapiens
SDNLYPESITSRDCVQLGPPSEGELVELRWTDGNLYKAKFISSVTSHIYQVEFEDGSQLTVKRGDIFTLEEELPKRVRSR

SEQ ID NO: 503 - protein, 80 aa, Homo sapiens
GIPASKVSKWSTDEVSEFIQSLPGCEEHGKVFKDEQIDGEAFLLMTQTDIVKIMSIKLGPALKIFNSILMFKAAEKNSHN

SEQ ID NO: 504 - protein, 80 aa, Homo sapiens
EPSGLHEKRKQRRIRTTFTSAQLKELERVFAETHYPDIYTREELALKIDLTEARVQVWFQNRRAKFRKQERAASAKGAAG

SEQ ID NO: 505 - protein, 80 aa, Homo sapiens
LLLHGPFARKPKRIRTAFSPSQLLRLERAFEKNHYVVGAERKQLAGSLSLSETQVKVWFQNRRTKYKRQKLEEEGPESEQ

SEQ ID NO: 506 - protein, 80 aa, Homo sapiens
SSGNDDDLTIPRAAINKMIKETLPNVRVANDARELVVNCCTEFIHLISSEANEICNKSEKKTISPEHVIQALESLGFGSY

SEQ ID NO: 507 - protein, 80 aa, Homo sapiens
ERRPQAPAKKLRKPRTIYSSLQLQHLNQRFQHTQYLALPERAQLAAQLGLTQTQVKIWFQNKRSKYKKLLKQNSGGQEGD

SEQ ID NO: 508 - protein, 80 aa, Homo sapiens
NVQDRVKRPMNAFIVWSRDQRRKMALENPRMRNSEISKQLGYQWKMLTEAEKWPFFQEAQKLQAMHREKYPNYKYRPRRK

SEQ ID NO: 509 - protein, 80 aa, Homo sapiens
EITRLAVWAAVQAVERKLEAQAMRLLTLEGRTGTNEKKIADCEKTAVEFANHLESKWVVLGTLLQEYGLLQRRLENMENL

SEQ ID NO: 510 - protein, 80 aa, Homo sapiens
CEKDIDECSEGIIECHNHSRCVNLPGWYHCECRSGFHDDGTYSLSGESCIDIDECALRTHTCWNDSACINLAGGFDCLCP

SEQ ID NO: 511 - protein, 80 aa, Homo sapiens
AAISLWTVVAAVQAIERKVEIHSRRLLHLEGRTGTAEKKLASCEKTVTELGNQLEGKWAVLGTLLQEYGLLQRRLENLEN

SEQ ID NO: 512 - protein, 80 aa, Homo sapiens
GQNRPLIKPKRRLSAARRAGTSCANCQTTTTTLWRRNANGDPVCNACGLYYKLHNINRPLTMKKEGIQTRNRKMSSKSKK

SEQ ID NO: 513 - protein, 80 aa, Homo sapiens
HAELPGKHCRRRKARTVFSDSQLSGLEKRFEIQRYLSTPERVELATALSLSETQVKTWFQNRRMKHKKQLRKSQDEPKAP

SEQ ID NO: 514 - protein, 80 aa, Homo sapiens
QDATVYVGGLDEKVSEPLLWELFLQAGPVVNTHMPKDRVTGQHQGYGFVEFLSEEDADYAIKIMNMIKLYGKPIRVNKAS

SEQ ID NO: 515 - protein, 80 aa, Homo sapiens
PIDNDAEGVWSPDIEQSFQEALAIYPPCGRRKIILSDEGKMYGRNELIARYIKLRTGKTRTRKQVSSHIQVLARRKSRDF

SEQ ID NO: 516 - protein, 80 aa, Homo sapiens
GLDNDAEGVWSPDIEQSFQEALAIYPPCGRRKIILSDEGKMYGRNELIARYIKLRTGKTRTRKQVSSHIQVLARKKVREY

SEQ ID NO: 517 - protein, 80 aa, Homo sapiens
DSVGTPQSNGGMRLHDFVSKTVIKPESCVPCGKRIKFGKLSLKCRDCRVVSHPECRDRCPLPCIPTLIGTPVKIGEGMLA

SEQ ID NO: 518 - protein, 80 aa, Homo sapiens
SAPHSMTASSSSVSSPSPGLPRRSAPPSPLCRSLSPGTGGGVRGGVGYLSRGDPVRVLARRVRPDGSVQYLVEWGGGGIF

SEQ ID NO: 519 - protein, 80 aa, Homo sapiens
GDPHYSFNHPFSINNLMSSSEQQHKLDFKAYEQALQYSPYGSTLPASLPLGSASVTTRSPIEPSALEPAYYQGVYSRPVL

SEQ ID NO: 520 - protein, 80 aa, Homo sapiens
GQNRPLIKPKRRLSAARRAGTCCANCQTTTTTLWRRNANGDPVCNACGLYYKLHNVNRPLTMKKEGIQTRNRKMSNKSKK

SEQ ID NO: 521 - protein, 80 aa, Homo sapiens
DSLSGSSLYSTSANLPVMGHEKFPSDLDLDMFNGSLECDMESIIRSELMDADGLDFNFDSLISTQNVVGLNVGNFTGAKQ

SEQ ID NO: 522 - protein, 80 aa, Homo sapiens
TEISLWTVVAAIQAVEKKMESQAARLQSLEGRTGTAEKKLADCEKMAVEFGNQLEGKWAVLGTLLQEYGLLQRRLENVEN

SEQ ID NO: 523 - protein, 80 aa, Homo sapiens
MDSGTRRKNATRETTSTLKAWLQEHRKNPYPTKGEKIMLAIITKMTLTQVSTWFANARRRLKKENKMTWPPRNKCADEKR

SEQ ID NO: 524 - protein, 80 aa, Homo sapiens
NIEKQIYLPSTRAKTSIVWHFFHVDPQYTWRAICNLCEKSVSRGKPGSHLGTSTLQRHLQARHSPHWTRANKFGVASGEE

SEQ ID NO: 525 - protein, 80 aa, Homo sapiens
AKQNDDSEAGAKRPRTTITAKQLETLKNAYKNSPKPARHVREQLSSETGLDMRVVQVWFQNRRAKEKRLKKDAGRHRWGQ

SEQ ID NO: 526 - protein, 80 aa, Homo sapiens
DALSYLDQVKLQFGSQPQVYNDFLDIMKEFKSQSIDTPGVISRVSQLFKGHPDLIMGFNTFLPPGYKIEVQTNDMVNVTT

SEQ ID NO: 527 - protein, 80 aa, Homo sapiens
DDHTVCLWDINAGPKEGKIVDAKAIFTGHSAVVEDVAWHLLHESLFGSVADDQKLMIWDTRSNTTSKPSHLVDAHTAEVN

SEQ ID NO: 528 - protein, 80 aa, Homo sapiens
GSILLDKDGKRKHTRPTFSGQQIFALEKTFEQTKYLAGPERARLAYSLGMTESQVKVWFQNRRTKWRKKHAAEMATAKKK

SEQ ID NO: 529 - protein, 80 aa, Homo sapiens
DPTALVEAIVEEVACPICMTFLREPMSIDCGHSFCHSCLSGLWEIPGESQNWGYTCPLCRAPVQPRNLRPNWQLANVVEK

SEQ ID NO: 530 - protein, 80 aa, Homo sapiens
QSLPKKVSLSSDTTRKPLEIRSPSAESKKPKWVPPAASGGSRSSSSPLVVVSVKSPNQSLRLGLSRLARVKPLHPNATST

SEQ ID NO: 531 - protein, 80 aa, Homo sapiens
AKSSQRKQRDCVNQCKSKPGLSTSIPLRMSSYTFKRPVTRITPHPGNEVRYHQWEESLEKPQQVCWQRRLQGLQAYSSAG

SEQ ID NO: 532 - protein, 80 aa, Homo sapiens
VRMVNGKPKKVRKPRTIYSSFQLAALQRRFQKTQYLALPERAELAASLGLTQTQVKIWFQNKRSKIKKIMKNGEMPPEHS

SEQ ID NO: 533 - protein, 80 aa, Homo sapiens
LQCNNHACGWDGGDCSLNFNDPWKNCTQSLQCWKYFSDGHCDSQCNSAGCLFDGFDCQRAEGQCNPLYDQYCKDHFSDGH

SEQ ID NO: 534 - protein, 80 aa, Homo sapiens
ETWVEEDELFQVQAAPDEDSTTNITKKQKWTVEESEWVKAGVQKYGEGNWAAISKNYPFVNRTAVMIKDRWRTMKRLGMN

SEQ ID NO: 535 - protein, 80 aa, Homo sapiens
AEISLWTVVAAIQAVERKVDAQASQLLNLEGRTGTAEKKLADCEKTAVEFGNHMESKWAVLGTLLQEYGLLQRRLENLEN

SEQ ID NO: 536 - protein, 80 aa, Homo sapiens
LEKRTLFRLDLVPINRSVGLKAKPTKPVTEVLRPVVARYGLDLSGLLVRLSGEKEPLDLGAPISSLDGQRVVLEEKDPSR

SEQ ID NO: 537 - protein, 80 aa, Homo sapiens
PNCLSSSMQLPHGGGRHQELVRFRDVAVVFSPEEWDHLTPEQRNLYKDVMLDNCKYLASLGNWTYKAHVMSSLKQGKEPW

SEQ ID NO: 538 - protein, 80 aa, Homo sapiens
DDYKEGDLRIMPESSESPPTEREPGGVVDGLIGKHVEYTKEDGSKRIGMVIHQVEAKPSVYFIKFDDDFHIYVYDLVKKS

SEQ ID NO: 539 - protein, 80 aa, Homo sapiens
SEPDLPLKRKQRRSRTTFTAEQLEELEKAFERTHYPDIYTREELAQRTKLTEARVQVWFSNRRARWRKQAGANQLAAFNH

SEQ ID NO: 540 - protein, 80 aa, Homo sapiens
AGGVLDKDGKKKHSRPTFSGQQIFALEKTFEQTKYLAGPERARLAYSLGMTESQVKVWFQNRRTKWRKRHAVEMASAKKK

SEQ ID NO: 541 - protein, 80 aa, Homo sapiens
DVMSFSVTVTTIPASQAMNPSSHGQTIPVQAFSEENSIEGTPSKCYCRLKAMIMCKGCGAFCHDDCIGPSKLCVSCLVVR

SEQ ID NO: 542 - protein, 80 aa, Homo sapiens
GGYSSVSSCNGYGRMGLLHQEKLPSDLDGMFIERLDCDMESIIRNDLMDGDTLDFNFDNVLPNQSFPHSVKTTTHSWVSG

SEQ ID NO: 543 - protein, 80 aa, Homo sapiens
GGSPTGFGCKSRPKARSSTGRECVNCGATSTPLWRRDGTGHYLCNACGLYHKMNGQNRPLIKPKRRLSAARRAGTSCANC

SEQ ID NO: 544 - protein, 80 aa, Homo sapiens
GQNRPLIRPKKRLIVSKRAGTQCTNCQTTTTTLWRRNASGDPVCNACGLYYKLHQVNRPLTMRKDGIQTRNRKASGKGKK

SEQ ID NO: 545 - protein, 80 aa, Homo sapiens
PVALLRKQNFQPTAQQQLTKPAKITCANCKKPLQKGQTAYQRKGSAHLFCSTTCLSSFSHKRTQNTRSIICKKDASTKKA

SEQ ID NO: 546 - protein, 80 aa, Homo sapiens
TEITLWTVVAAIQALEKKVDSCLTRLLTLEGRTGTAEKKLADCEKTAVEFGNQLEGKWAVLGTLLQEYGLLQRRLENVEN

SEQ ID NO: 547 - protein, 80 aa, Homo sapiens
KKQRGRPSSQPRRNIVGCRISHGWKEGDEPITQWKGTVLDQVPINPSLYLVKYDGIDCVYGLELHRDERVLSLKILSDRV

SEQ ID NO: 548 - protein, 80 aa, Homo sapiens
WTCDLDDDCGDRSDESASCAYPTCFPLTQFTCNNGRCININWRCDNDNDCGDNSDEAGCSHSCSSTQFKCNSGRCIPEHW

SEQ ID NO: 549 - protein, 80 aa, Homo sapiens
PKGAAAPSASQRRKRTSFSAEQLQLLELVFRRTRYPDIHLRERLAALTLLPESRIQVWFQNRRAKSRRQSGKSFQPLARP

SEQ ID NO: 550 - protein, 80 aa, Homo sapiens
KIKYDWYQTESQVVITLMIKNVQKNDVNVEFSEKELSALVKLPSGEDYNLKLELLHPIIPEQSTFKVLSTKIEIKLKKPE

SEQ ID NO: 551 - protein, 80 aa, Homo sapiens
DPSKEVEYVCELCKGAAPPDSPVVYSDRAGYNKQWHPTCFVCAKCSEPLVDLIYFWKDGAPWCGRHYCESLRPRCSGCDE

SEQ ID NO: 552 - protein, 80 aa, Homo sapiens
GSGAGKAKKSVDKNSNEYRVRRERNNIAVRKSRDKAKQRNVETQQKVLELTSDNDRLRKRVEQLSRELDTLRGIFRQLPE

SEQ ID NO: 553 - protein, 80 aa, Homo sapiens
GPASSFTPKQRSKARSCSEGRECVNCGATATPLWRRDGTGHYLCNACGLYHKMNGQNRPLIKPKRRLSAARRAGTCCANC

SEQ ID NO: 554 - protein, 80 aa, Homo sapiens
KPSDHIKRPMNAFMVWSRGQRRKMAQENPKMHNSEISKRLGAEWKLLSEAEKRPYIDEAKRLRAQHMKEHPDYKYRPRRK

SEQ ID NO: 555 - protein, 80 aa, Homo sapiens
LYSGFQQTADKCSVCGHLIMEMILQALGKSYHPGCFRCSVCNECLDGVPFTVDVENNIYCVRDYHTVFAPKCASCARPIL

SEQ ID NO: 556 - protein, 80 aa, Homo sapiens
HPSQDLVFSASPDATIRIWSVPNASCVQVVRAHESAVTGLSLHATGDYLLSSSDDQYWAFSDIQTGRVLTKVTDETSGCS

SEQ ID NO: 557 - protein, 80 aa, Homo sapiens
ELSAVGERVFAAESIIKRRIRKGRIEYLVKWKGWAIKYSTWEPEENILDSRLIAAFEQKERERELYGPKKRGPKPKTFLL

SEQ ID NO: 558 - protein, 80 aa, Homo sapiens
RTGSDSKSGKPRRARTAFTYEQLVALENKFKATRYLSVCERLNLALSLSLTETQVKIWFQNRRTKWKKQNPGADTSAPTG

SEQ ID NO: 559 - protein, 80 aa, Homo sapiens
VWDLSKIGEEQSPEDAEDGPPELLFIHGGHTAKISDFSWNPNEPWVICSVSEDNIMQVWQMAENIYNDEDPEGSVDPEGQ

SEQ ID NO: 560 - protein, 80 aa, Homo sapiens
ERCTPAGGGAEPRKLSRTPKCARCRNHGVVSCLKGHKRFCRWRDCQCANCLLVVERQRVMAAQVALRRQQATEDKKGLSG

SEQ ID NO: 561 - protein, 80 aa, Homo sapiens
SQPGALIPGDPQAMSQPNRGPSPFSPVQLHQLRAQILAYKMLARGQPLPETLQLAVQGKRTLPGLQQQQQQQQQQQQQQQ

SEQ ID NO: 562 - protein, 573 aa, Homo sapiens; identical to SEQ ID NO: 89

SEQ ID NO: 563 - protein, 441 aa, Homo sapiens
MSEREVSTAPAGTDMPAAKKQKLSSDENSNPDLSGDENDDAVSIESGTNTERPDTPTNTPNAPGRKSWGKGKWKSKKCKYSFKCVNSLKEDHNQPLFGVQFNWHSKEGDPLVFATVGSNRVTLYECHSQGEIRLLQSYVDADADENFYTCAWTYDSNTSHPLLAVAGSRGIIRIINPITMQCIKHYVGHGNAINELKFHPRDPNLLLSVSKDHALRLWNIQTDTLVAIFGGVEGHRDEVLSADYDLLGEKIMSCGMDHSLKLWRINSKRMMNAIKESYDYNPNKTNRPFISQKIHFPDFSTRDIHRNYVDCVRWLGDLILSKSCENAIVCWKPGKMEDDIDKIKPSESNVTILGRFDYSQCDIWYMRFSMDFWQKMLALGNQVGKLYVWDLEVEDPHKAKCTTLTHHKCGAAIRQTSFSRDSSILIAVCDDASIWRWDRLR

SEQ ID NO: 564 - protein, 485 aa, Homo sapiens
MPAMVEKGPEVSGKRRGRNNAAASASAAAASAAASAACASPAATAASGAAASSASAAAASAAAAPNNGQNKSLAAAAPNGNSSSNSWEEGSSGSSSDEEHGGGGMRVGPQYQAVVPDFDPAKLARRSQERDNLGMLVWSPNQNLSEAKLDEYIAIAKEKHGYNMEQALGMLFWHKHNIEKSLADLPNFTPFPDEWTVEDKVLFEQAFSFHGKTFHRIQQMLPDKSIASLVKFYYSWKKTRTKTSVMDRHARKQKREREESEDELEEANGNNPIDIEVDQNKESKKEVPPTETVPQVKKEKHSTQAKNRAKRKPPKGMFLSQEDVEAVSANATAATTVLRQLDMELVSVKRQIQNIKQTNSALKEKLDGGIEPYRLPEVIQKCNARWTTEEQLLAVQAIRKYGRDFQAISDVIGNKSVVQVKNFFVNYRRRFNIDEVLQEWEAEHGKEETNGPSNQKPVKSPDNSIKMPEEEDEAPVLDVRYASAS

SEQ ID NO: 565 - protein, 77 aa, synthetic construct
TGRTLVTFKDVFVDFTREEWKLLDTAQQIVYRNVMLENYKNLVSLGYQLTKPDVILRLEKGEEPLEINLWITKFVKD

SEQ ID NO: 566 - protein, 120 aa, synthetic construct
MYPYDVPDYASPKKKRKVGGGASMDAKSLTAWSRTLVTFKDVFVDFTREEWKLLDTAQQIVYRNVMLENYKNLVSLGYQLTKPDVILRLEKGEEPWLVEREIHQETHPDSETAFEIKSSV

SEQ ID NO: 567 - protein, 117 aa, synthetic construct
ALSPQHSAVTQGSIIKNKEGMDAKSLTAWSRTLVTFKDVFVDFTREEWKLLDTAQQIVYRNVMLENYKNLVSLGYQLTKPDVILRLEKGEEPWLVEREIHQETHPDSETAFEIKSSV

SEQ ID NO: 568 - protein, 62 aa, synthetic construct
RTLVTFKDVFVDFTREEWKLLDTAQQIVYRNVMLENYKNLVSLGYQLTKPDVILRLEKGEEP

SEQ ID NO: 569 - protein, 98 aa, synthetic construct
RTLVTFKDVFVDFTREEWKLLDTAQQIVYRNVMLENYKNLVSLGYQLTKPDVILRLEKGEEPWLVEREIHQETHPDSETAFEIKSSVSSRSIFKDKQS

SEQ ID NO: 570 - protein, 99 aa, synthetic construct
RTLVTFKDVAVDFTQEEWQQLDPAQKIVYRDVMLENYSNLVSVGYQLTKPDVILRLEQKGEEPWLVEEEIHQETHPDSETAFEIKSSVSSRSIFKDKQS

SEQ ID NO: 571 - protein, 95 aa, synthetic construct
RTLVTFKDVFVDFTREEWKLLDTAQQIVYRNVMLENYKNLVSLGYQLTKPDVILRLEKGEEPWLEEEEVLGSGRAEKNGDIGGQIWKPKDVKESL

SEQ ID NO: 572 - protein, 103 aa, synthetic construct
MNNSQGRVTFEDVTVNFTQGEWQRLNPEQRNLYRDVMLENYSNLVSVGQGETTKPDVILRLEQGKEPWLVEREIHQETHPDSETAFEIKSSVSSRSIFKDKQS

SEQ ID NO: 573 - protein, 1615 aa, Homo sapiens
MPARTAPARVPTLAVPAISLPDDVRRRLKDLERDSLTEKECVKEKLNLLHEFLQTEIKNQLCDLETKLRKEELSEEGYLAKVKSLLNKDLSLENGAHAYNREVNGRLENGNQARSEARRVGMADANSPPKPLSKPRTPRRSKSDGEAKPEPSPSPRITRKSTRQTTITSHFAKGPAKRKPQEESERAKSDESIKEEDKDQDEKRRRVTSRERVARPLPAEEPERAKSGTRTEKEEERDEKEEKRLRSQTKEPTPKQKLKEEPDREARAGVQADEDEDGDEKDEKKHRSQPKDLAAKRRPEEKEPEKVNPQISDEKDEDEKEEKRRKTTPKEPTEKKMARAKTVMNSKTHPPKCIQCGQYLDDPLKYGQHPPDAVDEPQMLTNEKLSIFDANESGFESYEALPQHKLTCFSVYCKHGHLCPIDTGLIEKNIELFFSGSAKPIYDDDPSLEGGVNGKNLGPINEWWITGFDGGEKALIGFSTSFAEYILMDPSPEYAPIFGLMQEKIYISKIVVEFLQSNSDSTYEDLINKIETTVPPSGLNLNRFTEDSLLRHAQFVVEQVESYDEAGDSDEQPIFLTPCMRDLIKLAGVTLGQRRAQARRQTIRHSTREKDRGPTKATTTKLVYQIFDTFFAEQIEKDDREDKENAFKRRRCGVCEVCQQPECGKCKACKDMVKFGGSGRSKQACQERRCPNMAMKEADDDEEVDDNIPEMPSPKKMHQGKKKKQNKNRISWVGEAVKTDGKKSYYKKVCIDAETLEVGDCVSVIPDDSSKPLYLARVTALWEDSSNGQMFHAHWFCAGTDTVLGATSDPLELFLVDECEDMQLSYIHSKVKVIYKAPSENWAMEGGMDPESLLEGDDGKTYFYQLWYDQDYARFESPPKTQPTEDNKFKFCVSCARLAEMRQKEIPRVLEQLEDLDSRVLYYSATKNGILYRVGDGVYLPPEAFTFNIKLSSPVKRPRKEPVDEDLYPEHYRKYSDYIKGSNLDAPEPYRIGRIKEIFCPKKSNGRPNETDIKIRVNKFYRPENTHKSTPASYHADINLLYWSDEEAVVDFKAVQGRCTVEYGEDLPECVQVYSMGGPNRFYFLEAYNAKSKSFEDPPNHARSPGNKGKGKGKGKGKPKSQACEPSEPEIEIKLPKLRTLDVFSGCGGLSEGFHQAGISDTLWAIEMWDPAAQAFRLNNPGSTVFTEDCNILLKLVMAGETTNSRGQRLPQKGDVEMLCGGPPCQGFSGMNRFNSRTYSKFKNSLVVSFLSYCDYYRPRFFLLENVRNFVSFKRSMVLKLTLRCLVRMGYQCTFGVLQAGQYGVAQTRRRAIILAAAPGEKLPLFPEPLHVFAPRACQLSVVVDDKKFVSNITRLSSGPFRTITVRDTMSDLPEVRNGASALEISYNGEPQSWFQRQLRGAQYQPILRDHICKDMSALVAARMRHIPLAPGSDWRDLPNIEVRLSDGTMARKLRYTHHDRKNGRSSSGALRGVCSCVEAGKACDPAARQFNTLIPWCLPHTGNRHNHWAGLYGRLEWDGFFSTTVTNPEPMGKQGRVLHPEQHRVVSVRECARSQGFPDTYRLFGNILDKHRQVGNAVPPPLAKAIGLEIKLCMLAKARESASAKIKEEEAAKD

SEQ ID NO: 574 - protein, 912 aa, Homo sapiens
MPAMPSSGPGDTSSSAAEREEDRKDGEEQEEPRGKEERQEPSTTARKVGRPGRKRKHPPVESGDTPKDPAVISKSPSMAQDSGASELLPNGDLEKRSEPQPEEGSPAGGQKGGAPAEGEGAAETLPEASRAVENGCCTPKEGRGAPAEAGKEQKETNIESMKMEGSRGRLRGGLGWESSLRQRPMPRLTFQAGDPYYISKRKRDEWLARWKREAEKKAKVIAGMNAVEENQGPGESQKVEEASPPAVQQPTDPASPTVATTPEPVGSDAGDKNATKAGDDEPEYEDGRGFGIGELVWGKLRGFSWWPGRIVSWWMTGRSRAAEGTRWVMWFGDGKFSVVCVEKLMPLSSFCSAFHQATYNKQPMYRKAIYEVLQVASSRAGKLFPVCHDSDESDTAKAVEVQNKPMIEWALGGFQPSGPKGLEPPEEEKNPYKEVYTDMWVEPEAAAYAPPPPAKKPRKSTAEKPKVKEIIDERTRERLVYEVRQKCRNIEDICISCGSLNVTLEHPLFVGGMCQNCKNCFLECAYQYDDDGYQSYCTICCGGREVLMCGNNNCCRCFCVECVDLLVGPGAAQAAIKEDPWNCYMCGHKGTYGLLRRREDWPSRLQMFFANNHDQEFDPPKVYPPVPAEKRKPIRVLSLFDGIATGLLVLKDLGIQVDRYIASEVCEDSITVGMVRHQGKIMYVGDVRSVTQKHIQEWGPFDLVIGGSPCNDLSIVNPARKGLYEGTGRLFFEFYRLLHDARPKEGDDRPFFWLFENVVAMGVSDKRDISRFLESNPVMIDAKEVSAAHRARYFWGNLPGMNRPLASTVNDKLELQECLEHGRIAKFSKVRTITTRSNSIKQGKDQHFPVFMNEKEDILWCTEMERVFGFPVHYTDVSNMSRLARQRLLGRSWSVPVIRHLFAPLKEYFACV

SEQ ID NO: 575 - protein, 301 aa, Homo sapiens
NHDQEFDPPKVYPPVPAEKRKPIRVLSLFDGIATGLLVLKDLGIQVDRYIASEVCEDSITVGMVRHQGKIMYVGDVRSVTQKHIQEWGPFDLVIGGSPCNDLSIVNPARKGLYEGTGRLFFEFYRLLHDARPKEGDDRPFFWLFENVVAMGVSDKRDISRFLESNPVMIDAKEVSAAHRARYFWGNLPGMNRPLASTVNDKLELQECLEHGRIAKFSKVRTITTRSNSIKQGKDQHFPVFMNEKEDILWCTEMERVFGFPVHYTDVSNMSRLARQRLLGRSWSVPVIRHLFAPLKEYFACV

SEQ ID NO: 576 - protein, 853 aa, Homo sapiens
MKGDTRHLNGEEDAGGREDSILVNGACSDQSSDSPPILEAIRTPEIRGRRSSSRLSKREVSSLLSYTQDLTGDGDGEDGDGSDTPVMPKLFRETRTRSESPAVRTRNNNSVSSRERHRPSPRSTRGRQGRNHVDESPVEFPATRSLRRRATASAGTPWPSPPSSYLTIDLTDDTEDTHGTPQSSSTPYARLAQDSQQGGMESPQVEADSGDGDSSEYQDGKEFGIGDLVWGKIKGFSWWPAMVVSWKATSKRQAMSGMRWVQWFGDGKFSEVSADKLVALGLFSQHFNLATFNKLVSYRKAMYHALEKARVRAGKTFPSSPGDSLEDQLKPMLEWAHGGFKPTGIEGLKPNNTQPVVNKSKVRRAGSRKLESRKYENKTRRRTADDSATSDYCPAPKRLKTNCYNNGKDRGDEDQSREQMASDVANNKSSLEDGCLSCGRKNPVSFHPLFEGGLCQTCRDRFLELFYMYDDDGYQSYCTVCCEGRELLLCSNTSCCRCFCVECLEVLVGTGTAAEAKLQEPWSCYMCLPQRCHGVLRRRKDWNVRLQAFFTSDTGLEYEAPKLYPAIPAARRRPIRVLSLFDGIATGYLVLKELGIKVGKYVASEVCEESIAVGTVKHEGNIKYVNDVRNITKKNIEEWGPFDLVIGGSPCNDLSNVNPARKGLYEGTGRLFFEFYHLLNYSRPKEGDDRPFFWMFENVVAMKVGDKRDISRFLECNPVMIDAIKVSAAHRARYFWGNLPGMNRPVIASKNDKLELQDCLEYNRIAKLKKVQTITTKSNSIKQGKNQLFPVVMNGKEDVLWCTELERIFGFPVHYTDVSNMGRGARQKLLGRSWSVPVIRHLFAPLKDYFACE

SEQ ID NO: 577 - protein, 740 aa, Mus musculus
MRGGSRHLSNEEDVSGCEDCIIISGTCSDQSSDPKTVPLTQVLEAVCTVENRGCRTSSQPSKRKASSLISYVQDLTGDGDEDRDGEVGGSSGSGTPVMPQLFCETRIPSKTPAPLSWQANTSASTPWLSPASPYPIIDLTDEDVIPQSISTPSVDWSQDSHQEGMDTTQVDAESRDGGNIEYQVSADKLLLSQSCILAAFYKLVPYRESIYRTLEKARVRAGKACPSSPGESLEDQLKPMLEWAHGGFKPTGIEGLKPNKKQPENKSRRRTTNDPAASESSPPKRLKTNSYGGKDRGEDEESREQMASDVTNNKGNLEDHCLSCGRKDPVSFHPLFEGGLCQSCRDRFLELFYMYDEDGYQSYCTVCCEGRELLLCSNTSCCRCFCVECLEVLVGAGTAEDVKLQEPWSCYMCLPQRCHGVLRRRKDWNMRLQDFFTTDPDLEEFEPPKLYPAIPAAKRRPIRVLSLFDGIATGYLVLKELGIKVEKYIASEVCAESIAVGTVKHEGQIKYVDDIRNITKEHIDEWGPFDLVIGGSPCNDLSCVNPVRKGLFEGTGRLFFEFYRLLNYSCPEEEDDRPFFWMFENVVAMEVGDKRDISRFLECNPVMIDAIKVSAAHRARYFWGNLPGMNRPVMASKNDKLELQDCLEFSRTAKLKKVQTITTKSNSIRQGKNQLFPVVMNGKDDVLWCTELERIFGFPEHYTDVSNMGRGARQKLLGRSWSVPVIRHLFAPLKDHFACE

SEQ ID NO: 578 - protein, 387 aa, Homo sapiens
MAAIPALDPEAEPSMDVILVGSSELSSSVSPGTGRDLIAYEVKANQRNIEDICICCGSLQVHTQHPLFEGGICAPCKDKFLDALFLYDDDGYQSYCSICCSGETLLICGNPDCTRCYCFECVDSLVGPGTSGKVHAMSNWVCYLCLPSSRSGLLQRRRKWRSQLKAFYDRESENPLEMFETVPVWRRQPVRVLSLFEDIKKELTSLGFLESGSDPGQLKHVVDVTDTVRKDVEEWGPFDLVYGATPPLGHTCDRPPSWYLFQFHRLLQYARPKPGSPRPFFWMFVDNLVLNKEDLDVASRFLEMEPVTIPDVHGGSLQNAVRVWSNIPAIRSSRHWALVSEEELSLLAQNKQSSKLAAKWPTKLVKNCFLPLREYFKYFSTELTSSL

SEQ ID NO: 579 - protein, 213 aa, Homo sapiens
NPLEMFETVPVWRRQPVRVLSLFEDIKKELTSLGFLESGSDPGQLKHVVDVTDTVRKDVEEWGPFDLVYGATPPLGHTCDRPPSWYLFQFHRLLQYARPKPGSPRPFFWMFVDNLVLNKEDLDVASRFLEMEPVTIPDVHGGSLQNAVRVWSNIPAIRSRHWALVSEEELSLLAQNKQSSKLAAKWPTKLVKNCFLPLREYFKYFSTELTSSL

SEQ ID NO: 580 - protein, 421 aa, Mus musculus
MGSRETPSSCSKTLETLDLETSDSSSPDADSPLEEQWLKSSPALKEDSVDVVLEDCKEPLSPSSPPTGREMIRYEVKVNRRSIEDICLCCGTLQVYTRHPLFEGGLCAPCKDKFLESLFLYDDDGHQSYCTICCSGGTLFICESPDCTRCYCFECVDILVGPGTSERINAMACWVCFLCLPFSRSGLLQRRKRWRHQLKAFHDQEGAGPMEIYKTVSAWKRQPVRVLSLFRNIDKVLKSLGFLESGSGSGGGTLKYVEDVTNVVRRDVEKWGPFDLVYGSTQPLGSSCDRCPGWYMFQFHRILQYALPRQESQRPFFWIFMDNLLLTEDDQETTTRFLQTEAVTLQDVRGRDYQNAMRVWSNIPGLKSKHAPLTPKEEEYLQAQVRSRSKLDAPKVDLLVKNCLLPLREYFKYFSQNSLPL

SEQ ID NO: 581 - protein, 214 aa, Mus musculus
GPMEIYKTVSAWKRQPVRVLSLFRNIDKVLKSLGFLESGSGSGGGTLKYVEDVTNVVRRDVEKWGPFDLVYGSTQPLGSSCDRCPGWYMFQFHRILQYALPRQESQRPFFWIFMDNLLLTEDDQETTTRFLQTEAVTLQDVRGRDYQNAMRVWSNIPGLKSKHAPLTPKEEEYLQAQVRSRSKLDAPKVDLLVKNCLLPLREYFKYFSQNSLPL

SEQ ID NO: 582 - protein, 403 aa, Ailuropoda melanoleuca
MALSPTGTLSVETLDRSDPDPLDEGPWQATCEILLEPDAEHSTDVILVGSSELSAPASPGPRRDLLAYEVKVNQRDIEDVCICCGSLRVHTQHPLFEGGMCAPCKDKFLDCLFLYDDDGYQSYCSICCAGETLLICENPDCTRPSLMMKLRLFRECACLIFPSEGMLLQTVWFWKMTVVWQPGLRHLPQENPLETYKTVPVWKREPVRVLSLFGDIRRELMSLGFLESGSAPGRLKHLDDVTDVVRKDVEGWGPFDLVYGSTPPIGHACDHPPVWYLLQFHRILQYARPRPGSQQPFFWMFVDNLVLSQDDQTAATRFLEADPVTIQDVCGRAVRNTVHVWSNIPAVRSRHSALALCEELSLLAQDRQRTKPPAQGPAQLVKNCFLPLREYFKYFSTELTSSL

SEQ ID NO: 583 - protein, 213 aa, Ailuropoda melanoleuca
NPLETYKTVPVWKREPVRVLSLFGDIRRELMSLGFLESGSAPGRLKHLDDVTDVVRKDVEGWGPFDLVYGSTPPIGHACDHPPVWYLLQFHRILQYARPRPGSQQPFFWMFVDNLVLSQDDQTAATRFLEADPVTIQDVCGRAVRNTVHVWSNIPAVRSRHSALALCEELSLLAQDRQRTKPPAQGPAQLVKNCFLPLREYFKYFSTELTSSL

SEQ ID NO: 584 - protein, 426 aa, Carlito syrichta
MALSCRRTLPLESLHSSNSDLASQLDKEQWRPPCETHGIPVAAAPVLDLEAECSLDVILVGSSELSTSSSPRLGRDHIAYEVKVNQRNIEDICLCCGSFLVHTQHPLFEGGMCAPCKDKFLDTLFLYDEDGYQSYCSICCSGETLLICENPDCTRCYCFECLDTLVSPGTSEKVHAMSNWVCFLCLPFTRSGLLQRRRKWRGQLKAFYDRESESSLEMYKTVPVWKREPVRVLSLFGDIKKELMSLGFVETGSDPGRLRHLDDTTNIVRRNVEEWGPFHLLYGATPPLGHTCDRPPGWYLFQFHRLLQYARPQPGSPQPFFWMFVDNVMLTREDRAIASRFLETEPVTIPDIHGRALQNAVCVWSNIPAVRSKHSALVSEEELSLLAQDRQRAKLPTQGPTKLVKNCFLPLREYFKYFSTELTSFL

SEQ ID NO: 585 - protein, 213 aa, Carlito syrichta
SSLEMYKTVPVWKREPVRVLSLFGDIKKELMSLGFVETGSDPGRLRHLDDTTNIVRRNVEEWGPFHLLYGATPPLGHTCDRPPGWYLFQFHRLLQYARPQPGSPQPFFWMFVDNVMLTREDRAIASRFLETEPVTIPDIHGRALQNAVCVWSNIPAVRSKHSALVSEEELSLLAQDRQRAKLPTQGPTKLVKNCFLPLREYFKYFSTELTSFL

SEQ ID NO: 586 - protein, 424 aa, Meriones unguiculatus
MGSQETPSTRAKTPGTWNLESTDSSSPESLGHLEEQWANSSPDLKDEHSKDVEPEDSKELISSASPPSGREIIRYEISVNQRNIEDICLCCGTLQVYKQHPLFEGGICAPCKDKFLETFFLYDEDGHQSYCSICCSGGTLFICESPDCTRCYCFECVDILVGPGTSERINAMPCWVCFLCLPFTRSGLLQRRRKWRHQLKAFFDEGGASPLEMYKTVSAWKRKPMRVLSLFKNIDKELKNLGFLESGSGSEEERLKYLEDVTNVVRRDVEKWGPFDLVYGSTRPRGSSCDHCPAWYMFQFHRILQYARPPSGSEQPFFWVFVDNLLMTEDDQITADRFLQMKAVTLQDVRGRVLQNAVRVWSNIPGVKSKHMALTEKEEQSLEAQAGTRTKLSAQKVDPLVKNCLLPLREYFKFFSQNSLPLDK

SEQ ID NO: 587 - protein, 216 aa, Meriones unguiculatus
SPLEMYKTVSAWKRKPMRVLSLFKNIDKELKNLGFLESGSGSEEERLKYLEDVTNVVRRDVEKWGPFDLVYGSTRPRGSSCDHCPAWYMFQFHRILQYARPPSGSEQPFFWVFVDNLLMTEDDQITADRFLQMKAVTLQDVRGRVLQNAVRVWSNIPGVKSKHMALTEKEEQSLEAQAGTRTKLSAQKVDPLVKNCLLPLREYFKFFSQNSLPLDK

SEQ ID NO: 588 - protein, 409 aa, Ochotona princeps
MALPSPETLDSLDRVPASHPDEQHWTVCDNSDPILEVEAEGSMDVILVDDSPAPSGRDRIELEVKVNQRSIEDLCLCCGSSQVHRQHPLFQGGLCAPCKDKFLEALFLYDEDGYQSYCSICGLGDTLLVCESPDCTRGYCFACVDGLVGAGSSGHMHTVSPWVCFLCVPGSRHGLLQRRRRWRTQLKVFHEQEAAQPLEIYETVPACRRKPLRVLSLFEHIEKELASLGFLETGSSPGRIRHLDDVTDVVRRDVEQWGPFDLVYGSTPPLGHASPRSPGWYLFQFHRMLQYTQPTASTQRPFFWMFVDNLLLTRDDLVTATRFLEVEPATLQDVRGRVLQGAMRVWSNIPAVNSRHTELAPEAETALLAQSCRRAKASGEGLARLLKSCFLPLREYFKYFPQSPLPLRK

SEQ ID NO: 589 - protein, 214 aa, Ochotona princeps
QPLEIYETVPACRRKPLRVLSLFEHIEKELASLGFLETGSSPGRIRHLDDVTDVVRRDVEQWGPFDLVYGSTPPLGHASPRSPGWYLFQFHRMLQYTQPTASTQRPFFWMFVDNLLLTRDDLVTATRFLEVEPATLQDVRGRVLQGAMRVWSNIPAVNSRHTELAPEAETALLAQSCRRAKASGEGLARLLKSCFLPLREYFKYFPQSPLPLRK

SEQ ID NO: 590 - protein, 224 aa, Sciurus carolinensis
MGGPRPAAVEESPHEIYKTVPAWKREPMRVLSLFGDIGKELTSLGFLETGSEAGRLKHLEDVTDTVRRDVEEWGPFDLVYGSTPALGHSCDRSPGWYLFQFHRLLQYARPRLGSPKPFFWMFVDNLLLTKDDQAIASRFLEMEPVTLQDVHGRVLQNAVRVWTNVPAVKSRHSALASEEELLLVQDGQRGRLPAQGPAALVKHCFLPLREYFKYFSQNTLPLYK

SEQ ID NO: 591 - protein, 213 aa, Sciurus carolinensis
SPHEIYKTVPAWKREPMRVLSLFGDIGKELTSLGFLETGSEAGRLKHLEDVTDTVRRDVEEWGPFDLVYGSTPALGHSCDRSPGWYLFQFHRLLQYARPRLGSPKPFFWMFVDNLLLTKDDQAIASRFLEMEPVTLQDVHGRVLQNAVRVWTNVPAVKSRHSALASEEELLLVQDGQRGRLPAQGPAALVKHCFLPLREYFKYFSQNTLPLYK

SEQ ID NO: 592 - protein, 417 aa, Bison bison
MARSSPGTLNLEIMDGSDPDPALPPDREQWPPPCEILLDPEPEHSLDIILVGSSELSSPPSPGPRRDFIAYEVKVNQRDIEDVCICCGSLQLHTQHPLFEGGMCAPCKDKFLECLFLYDDDGYQSYCSICCAGETLLICENPDCTRCYCFECVDTLVGPGTSGKVHAMSNWVCFLCLPFPRSGLLQRRRKWRTWLKAFYDREAESPLVMYKTVPVWKREPIRVLSLFGDIKKELTSLGFLEDGSKPGRLKHLDDVTNIVRRDIDEWGPFDLTYGSTPTLGHTCDHPPGWYVYQFHRILQYARPLPGSPQPFFWMFVDNLVLTEEDLDVATRFLETDPVTIQDVRGRTVQNAVHVWSNIPAVKSRHSALVSQEELSLLAQDRQRVKSPVQGPATLVKNCFLPLREYFKYFSTELTSSL

SEQ ID NO: 593 - protein, 213 aa, Bison bison
SPLVMYKTVPVWKREPIRVLSLFGDIKKELTSLGFLEDGSKPGRLKHLDDVTNIVRRDIDEWGPFDLTYGSTPTLGHTCDHPPGWYVYQFHRILQYARPLPGSPQPFFWMFVDNLVLTEEDLDVATRFLETDPVTIQDVRGRTVQNAVHVWSNIPAVKSRHSALVSQEELSLLAQDRQRVKSPVQGPATLVKNCFLPLREYFKYFSTELTSSL

SEQ ID NO: 594 - protein, 443 aa, Equus przewalskii
MALSSPGTLSLETLDSWDPDVAGQLDEERWQPSSEIVGRPMAAAPVLDLEEEPSMDIILVDSSELSSPPSPGPSRDMCICCGSFQVHTQHPLFEGGMCAACKDKFLSCLFLYDDDGNQSYCSICCSGETLLICENPDCTRCYCFECVDTLVSPRTSEKVQAMSNWVCFLCLPFPRSGLLQRRRKWRGWLKAFYDQEAVRSRSAWGRRMRSGPHLVGFLWLLVAKCPSALESPLEMYKTVPVWKREPVRVLSLFGDIKKELTTLGFLENGSDPGRLKHLDDVTNTVRRDVEEWGPFDLVYGSTPPLGHACDHPPGWYLFQFHRVLQYARPRPGSPQAFFWMFVDNLVLTEDDRAVATRFLETDPVTIQDVCGRAVRNAVHVWSNIPAVKSRHSALFSQEESFLRAQDRQRAKPPARGPAKLVKNCFLPLREYFKYFSTEFTSSL

SEQ ID NO: 595 - protein, 213 aa, Equus przewalskii
SPLEMYKTVPVWKREPVRVLSLFGDIKKELTTLGFLENGSDPGRLKHLDDVTNTVRRDVEEWGPFDLVYGSTPPLGHACDHPPGWYLFQFHRVLQYARPRPGSPQAFFWMFVDNLVLTEDDRAVATRFLETDPVTIQDVCGRAVRNAVHVWSNIPAVKSRHSALFSQEESFLRAQDRQRAKPPARGPAKLVKNCFLPLREYFKYFSTEFTSSL

SEQ ID NO: 596 - protein, 415 aa, Mus caroli
MGSRETPSSFSKTLETLDLETSDSSSPDADSPLEEQWLKSSPALKEDNVDMVLEDCKEPLSPSSPPTGREMIRYEVKVNRRSIEDICLCCGTLQVYTQHPLFEGGICAPCKDKFLESLFLYDDDGHQSYCTICCSGGTLFICESPDCTRCYCFECVDILVGPGTSERINAMACWVCFLCLPFSRSGLLQRRKRWRHQLKAFHDQEGAGPMEIYKTVSTWKRQPVRVLSLFGNIDKVLKSLGFLESGSGSGGGTLKYVEDVTNVVRRDVEKWGPFDLVYGSTQPLGSSCDRCPGWYMFQFHRILQYALPRQESQRPFFWIFMDNLLMTEDDQETTARFLQTEAVTLQDVRGRDYQNVMRVWSNIPGLKSKHVPLTPKEEEYLQAQVRTRSKLDAQKVDLLVKNCLLPLREYFKYFS

SEQ ID NO: 597 - protein, 208 aa, Mus caroli
GPMEIYKTVSTWKRQPVRVLSLFGNIDKVLKSLGFLESGSGSGGGTLKYVEDVTNVVRRDVEKWGPFDLVYGSTQPLGSSCDRCPGWYMFQFHRILQYALPRQESQRPFFWIFMDNLLMTEDDQETTARFLQTEAVTLQDVRGRDYQNVMRVWSNIPGLKSKHVPLTPKEEEYLQAQVRTRSKLDAQKVDLLVKNCLLPLREYFKYFS

SEQ ID NO: 598 - protein, 387 aa, Pan troglodytes
MAAIPALDPEAEPSMDVILVGSSELSSSISPRTGRDLIAYEVKANQRNIEDICICCGSLQVHTQHPLFEGGICAPCKDKSLDALFLYDDDGYQSYCSICCSGETLLICGNPDCTRCYCFECVDSLVGPGTSGKVHAMSNWVCYLCLPSSRSGLLQRRRKWRSQLKAFYDRESENPLEMFETVPVWRRQPVRVLSLFEDIKKELTSLGFLESGSDPGQLKHVVDVTDTVRKDVEEWGPFDLVYGATPPLGHTCDRPPSWYLFQFHRLLQYARPKPGSPRPFFWMFVDNLVLNKEDLDVASRFLEMEPVTIPDVHGGSLQNAVRVWSNIPAIRSSRHWALVSEEELSLLAQNKQSSKLAAKWPTKLVKNCFLPLREYFKYFSTELTSSL

SEQ ID NO: 599 - protein, 214 aa, Pan troglodytes
NPLEMFETVPVWRRQPVRVLSLFEDIKKELTSLGFLESGSDPGQLKHVVDVTDTVRKDVEEWGPFDLVYGATPPLGHTCDRPPSWYLFQFHRLLQYARPKPGSPRPFFWMFVDNLVLNKEDLDVASRFLEMEPVTIPDVHGGSLQNAVRVWSNIPAIRSSRHWALVSEEELSLLAQNKQSSKLAAKWPTKLVKNCFLPLREYFKYFSTELTSSL

SEQ ID NO: 600 - protein, 391 aa, Homo sapiens
MEPLRVLELYSGVGGMHHALRESCIPAQVVAAIDVNTVANEVYKYNFPHTQLLAKTIEGITLEEFDRLSFDMILMSPPCQPFTRIGRQGDMTDSRTNSFLHILDILPRLQKLPKYILLENVKGFEVSSTRDLLIQTIENCGFQYQEFLLSPTSLGIPNSRLRYFLIAKLQSEPLPFQAPGQVLMEFPKIESVHPQKYAMDVENKIQEKNVEPNISFDGSIQCSGKDAILFKLETAEEIHRKNQQDSDLSVKMLKDFLEDDTDVNQYLLPPKSLLRYALLLDIVQPTCRRSVCFTKGYGSYIEGTGSVLQTAEDVQVENIYKSLTNLSQEEQITKLLILKLRYFTPKEIANLLGFPPEFGFPEKITVKQRYRLLGNSLNVHVVAKLIKILYE

SEQ ID NO: 601 - protein, 353 aa, unidentified
  source 1..353: note = Mycoplasmatales bacterium
MAEWYIPAIVSYQAIHNGFTLNKINHKIELQTMIDYLESKTLSMNSKEPVKRGFWYKKHLDEIRIVYTAVKMSEQEGNIFDVRTLFERGLSDIDLLTYSFPCQDLSQQGKQKGMGRDSQTRSGLLWEIEKALDTSKKEDLPKYLLMENVVALTHKVNAEELDEWMMKLESLGYKNDLRILNAGDFGSSQARRRTFMISTLNEKVELPVGNKKPKSMNKILNDEPTRKDFLPALDKFDLTEYKWTKSNINKAKLINYSTFNSEAYVYDSNFTGPTLTASGANSRIKFEYNGKIRKIGAEEAYAYMGFKKSDYIKVNKLNYLNETKMIYTCGNSISVEVLRSIMTNINNNFKENK

SEQ ID NO: 602 - protein, 398 aa, unidentified
  source 1..398: note = Mycoplasma marinum
MLFLIGTFKYVLIYITKVIRIFEAFAGIGAQRKALRNIKSNYEVSGMAEWYIPAIVSYQAIHNGFTLSRVDKKTKLTEMIKYLESKTLSMDSKEPVRTGYWFKKHKDMVRIVYSAVKLSEAEGNIFDVRTLHERKLEDIDLLTYSFPCQDLSQQGKQRGMKKDSGTRSGLLWEIEKALEATPKDKLPKYLLMENVVALTHKTNKKDLDNWKRKLRSLGYYNDINVLNAGDFGSSQARRRAFMISTLDSKVTLPLGDKKPQAISKILNKETRSQDFMPALDEYEKTDFKRTLSNIKKCKLIDYTSFNSEAYVYDPKYTGPTLTASGANSRIKFTHQGKMRKINAEEAYRYMGFSTNDYKKVNNLNFLSETKMIYTCGNSISVEVLEEIMLKIIREDNNG

SEQ ID NO: 603 - protein, 381 aa, Spiroplasma chinense
MKKIRLFEAFAGIGSQRRALKSVVGNNFEIAGLAEWYVPAIVMYQIINNDFSKKNVLDNVPRDEVIDYLNSKCLSWDSKKPVSKNFWNRKSQDILNVIYSAVKKSEEEGNIFDVRTLHERTLESIDILTYSFPCQDLSQQGIQKGMKKNSGTRSGLLWEIEKAIDNTPKNNLPKILLMENVPALLNKTNELELKEWLIKLENMGYKNSIGILNAADFGSPQARRRVFMISSRNKKIELPVGKSKPGKLNDILEKNVEDKFIMTNLEKYDFSEFSLTKSNIKKCSLINYTKFNSEAYVYDPDFTGPTLTASGANSRIKIYDKGFIRRMSPLESFRYMGFDDEDYKKIDEFEFLTDTQKIFVCGNSISIEVLKAIFERIDSNE

SEQ ID NO: 604 - protein, 395 aa, Mycoplasma penetrans
MNSNKDKIKVIKVFEAFAGIGSQFKALKNIARSKNWEIQHSGMVEWFVDAIVSYVAIHSKNFNPKIEQLDKDILSISNDSKMPISEYGIKKINNTIKASYLNYAKKHFNNLFDIKKVNKDNFPKNIDIFTYSFPCQDLSVQGLQKGIDKELNTRSGLLWEIERILEEIKNSFSKEEMPKYLLMENVKNLLSHKNKKNYNTWLKQLEKFGYKSKTYLLNSKNFDNCQNRERVFCLSIRDDYLEKTGFKFKELEKVKNPPKKIKDILVDSSNYKYLNLNKYETTTFRETKSNIISRSLKNYTTFNSENYVYNINGIGPTLTASGANSRIKIETQQGVRYLTPLECFKYMQFDVNDFKKVQSTNLISENKMIYIAGNSIPVKILEAIFNTLEFVNNEE

SEQ ID NO: 605 - protein, 386 aa, Spiroplasma monobiae
MSKVENKTKKLRVFEAFAGIGAQRKALEKVRKDEYEIVGLAEWYVPAIVMYQAIHNNFHTKLEYKSVSREEMIDYLENKTLSWNSKNPVSNGYWKRKKDDELKIIYNAIKLSEKEGNIFDIRDLYKRTLKNIDLLTYSFPCQDLSQQGIQKGMKRGSGTRSGLLWEIERALDSTEKNDLPKYLLMENVGALLHKKNEEELNQWKQKLESLGYQNSIEVLNAADFGSSQARRRVFMISTLNEFVELPKGDKKPKSIKKVLNKIVSEKDILNNLLKYNLTEFKKTKSNINKASLIGYSKFNSEGYVYDPEFTGPTLTASGANSRIKIKDGSNIRKMNSDETFLYIGFDSQDGKRVNEIEFLTENQKIFVCGNSISVEVLEAIIDKIGG

SEQ ID NO: 606 - protein, 358 aa, Haemophilus parainfluenzae
MKDVLDDNLLEEPAAQYSLFEPESNPNLREKFTFIDLFAGIGGFRIAMQNLGGKCIFSSEWDEQAQKTYEANFGDLPYGDITLEETKAFIPEKFDILCAGFPCQAFSIAGKRGGFEDTRGTLFFDVAEIIRRHQPKAFFLENVKGLKNHDKGRTLKTILNVLREDLGYFVPEPAIVNAKNFGVPQNRERIYIVGFHKSTGVNSFSYPEPLDKIVTFADIREEKTVPTKYYLSTQYIDTLRKHKERHESKGNGFGYEIIPDDGIANAIVVGGMGRERNLVIDHRITDFTPTTNIKGEVNREGIRKMTPREWARLQGFPDSYVIPVSDASAYKQFGNSVAVPAIQATGKKILEKLGNLYD

SEQ ID NO: 607 - protein, 521 aa, unidentified
  source 1..521: note = Arthrobacter luteus
MSKANAKYSFVDLFAGIGGFHAALAATGGVCEYAVEIDREAAAVYERNWNKPALGDITDDANDEGVTLRGYDGPIDVLTGGFPCQPFSKSGAQHGMAETRGTLFWNIARIIEEREPTVLILENVRNLVGPRHRHEWLTIIETLRFFGYEVSGAPAIFSPHLLPAWMGGTPQVRERVFITATLVPERMRDERIPRTETGEIDAEAIGPKPVATMNDRFPIKKGGTELFHPGDRKSGWNLLTSGIIREGDPEPSNVDLRLTETETLWIDAWDDLESTIRRATGRPLEGFPYWADSWTDFRELSRLVVIRGFQAPEREVVGDRKRYVARTDMPEGFVPASVTRPAIDETLPAWKQSHLRRNYDFFERHFAEVVAWAYRWGVYTDLFPASRRKLEWQAQDAPRLWDTVMHFRPSGIRAKRPTYLPALVAITQTSIVGPLERRLSPRETARLQGLPEWFDFGEQRAAATYKQMGNGVNVGVVRHILREHVRRDRALLKLTPAGQRIINAVLADEPDATVGALGAAE

SEQ ID NO: 608 - protein, 330 aa, Haemophilus aegyptius
MNLISLFSGAGGLDLGFQKAGFRIICANEYDKSIWKTYESNHSAKLIKGDISKISSDEFPKCDGIIGGPPCQSWSEGGSLRGIDDPRGKLFYEYIRILKQKKPIFFLAENVKGMMAQRHNKAVQEFIQEFDNAGYDVHIILLNANDYGVAQDRKRVFYIGFRKELNINYLPPIPHLIKPTFKDVIWDLKDNPIPALDKNKTNGNKCIYPNHEYFIGSYSTIFMSRNRVRQWNEPAFTVQASGRQCQLHPQAPVMLKVSKNLNKFVEGKEHLYRRLTVRECARVQGFPDDFIFHYESLNDGYKMIGNAVPVNLAYEIAKTIKSALEICKGN

SEQ ID NO: 609 - protein, 327 aa, Haemophilus haemolyticus
MIEIKDKQLTGLRFIDLFAGLGGFRLALESCGAECVYSNEWDKYAQEVYEMNFGEKPEGDITQVNEKTIPDHDILCAGFPCQAFSISGKQKGFEDSRGTLFFDIARIVREKKPKVVFMENVKNFASHDNGNTLEVVKNTMNELDYSFHAKVLNALDYGIPQKRERIYMICFRNDLNIQNFQFPKPFELNTFVKDLLLPDSEVEHLVIDRKDLVMTNQEIEQTTPKTVRLGIVGKGGQGERIYSTRGIAITLSAYGGGIFAKTGGYLVNGKTRKLHPRECARVMGYPDSYKVHPSTSQAYKQFGNSVVINVLQYIAYNIGSSLNFKPY

SEQ ID NO: 610 - protein, 418 aa, unidentified
  source 1..418: note = Moraxella
MKPEILKLIRSKLDLTQKQASEIIEVSDKTWQQWESGKTEMHPAYYSFLQEKLKDKINFEELSAQKTLQKKIFDKYNQNQITKNAEELAEITHIEERKDAYSSDFKFIDLFSGIGGIRQSFEVNGGKCVFSSEIDPFAKFTYYTNFGVVPFGDITKVEATTIPQHDILCAGFPCQPFSHIGKREGFEHPTQGTMFHEIVRIIETKKTPVLFLENVPGLINHDDGNTLKVIIETLEDMGYKVHHTVLDASHFGIPQKRKRFYLVAFLNQNIHFEFPKPPMISKDIGEVLESDVTGYSISEHLQKSYLFKKDDGKPSLIDKNTTGAVKTLVSTYHKIQRLTGTFVKDGETGIRLLTTNECKAIMGFPKDFVIPVSRTQMYRQMGNSVVVPVVTKIAEQISLALKTVNQQSPQENFELELV

SEQ ID NO: 611 - protein, 537 aa, unidentified
  source 1..537: note = Ascobolus
MSERRYEAGMTVALHEGSFLKIQRVYIRQYHADNRREHMLVGPLFRRTKYLKALSKKVNEVAIVHESIHVPVQDVIGVRELIITNRPFPECRKGDEHTGRLVCRWVYNLDERAKGREYKKQRYIRRITEAEADPEYRVEDRVLRRRWFQEGYIGDEISYKEHGNGDIVDIRSESPLQVLDGWGGDLVDLENGEETSIPGPCRSASSYGRLMKPPLAQAADSNTSRKYTFGDTFCGGGGVSLGARQAGLEVKWAFDMNPNAGANYRRNFPNTDFFLAEAEQFIQLSVGISQHVDILHLSPPCQTFSRAHTIAGKNDENNEASFFAVVNLIKAVRPRLFTVEETDGIMDRQSRQFIDTALMGITELGYSFRICVLNAIEYGVCQNRKRLIIIGAAPGEELPPFPLPTHQDFFSKDPRRDLLPAVTLDDALSTITPESTDHHLNHVWQPAEWKTPYDAHRPFKNAIRAGGGEYDIYPDGRRKFTVRELACIQGFPDEYEFVGTLTDKRRIIGNAVPPPLSAAIMSTLRQWMTEKDFERME

SEQ ID NO: 612 - protein, 1534 aa, unidentified
  source 1..1534: note = Arabidopsis
MVENGAKAAKRKKRPLPEIQEVEDVPRTRRPRRAAACTSFKEKSIRVCEKSATIEVKKQQIVEEEFLALRLTALETDVEDRPTRRLNDFVLFDSDGVPQPLEMLEIHDIFVSGAILPSDVCTDKEKEKGVRCTSFGRVEHWSISGYEDGSPVIWISTELADYDCRKPAASYRKVYDYFYEKARASVAVYKKLSKSSGGDPDIGLEELLAAVVRSMSSGSKYFSSGAAIIDFVISQGDFIYNQLAGLDETAKKHESSYVEIPVLVALREKSSKIDKPLQRERNPSNGVRIKEVSQVAESEALTSDQLVDGTDDDRRYAILLQDEENRKSMQQPRKNSSSGSASNMFYIKINEDEIANDYPLPSYYKTSEEETDELILYDASYEVQSEHLPHRMLHNWALYNSDLRFISLELLPMKQCDDIDVNIFGSGVVTDDNGSWISLNDPDSGSQSHDPDGMCIFLSQIKEWMIEFGSDDIISISIRTDVAWYRLGKPSKLYAPWWKPVLKTARVGISILTFLRVESRVARLSFADVTKRLSGLQANDKAYISSDPLAVERYLVVHGQIILQLFAVYPDDNVKRCPFVVGLASKLEDRHHTKWIIKKKKISLKELNLNPRAGMAPVASKRKAMQATTTRLVNRIWGEFYSNYSPEDPLQATAAENGEDEVEEEGGNGEEEVEEEGENGLTEDTVPEPVEVQKPHTPKKIRGSSGKREIKWDGESLGKTSAGEPLYQQALVGGEMVAVGGAVTLEVDDPDEMPAIYFVEYMFESTDHCKMLHGRFLQRGSMTVLGNAANERELFLTNECMTTQLKDIKGVASFEIRSRPWGHQYRKKNITADKLDWARALERKVKDLPTEYYCKSLYSPERGGFFSLPLSDIGRSSGFCTSCKIREDEEKRSTIKLNVSKTGFFINGIEYSVEDFVYVNPDSIGGLKEGSKTSFKSGRNIGLRAYVVCQLLEIVPKESRKADLGSFDVKVRRFYRPEDVSAEKAYASDIQELYFSQDTVVLPPGALEGKCEVRKKSDMPLSREYPISDHIFFCDLFFDTSKGSLKQLPANMKPKFSTIKDDTLLRKKKGKGVESEIESEIVKPVEPPKEIRLATLDIFAGCGGLSHGLKKAGVSDAKWAIEYEEPAGQAFKQNHPESTVFVDNCNVILRAIMEKGGDQDDCVSTTEANELAAKLTEEQKSTLPLPGQVDFINGGPPCQGFSGMNRFNQSSWSKVQCEMILAFLSFADYFRPRYFLLENVRTFVSFNKGQTFQLTLASLLEMGYQVRFGILEAGAYGVSQSRKRAFIWAAAPEEVLPEWPEPMHVFGVPKLKISLSQGLHYAAVRSTALGAPFRPITVRDTIGDLPSVENGDSRTNKEYKEVAVSWFQKEIRGNTIALTDHICKAMNELNLIRCKLIPTRPGADWHDLPKRKVTLSDGRVEEMIPFCLPNTAERHNGWKGLYGRLDWQGNFPTSVTDPQPMGKVGMCFHPEQHRILTVRECARSQGFPDSYEFAGNINHKHRQIGNAVPPPLAFALGRKLKEALHLKKSPQHQP

SEQ ID NO: 613 - protein, 1356 aa, unidentified
  source 1..1356: note = Ascobolus
MELTPELSGVSTDLGGGGSIFAHWRMKEESPAPTEILDDLNVLEWEKTTRDYSKEDLRIADQLFSIEDEHQSLPFETADAEDGTPTEEEEEKELPMRTLDNFVLYDASDLELAALDLIGTELNIHAVGTVGPIYTEGEEDEQEDEDEDVSPPVRTGTQATSASVTQMTVELYIRNIVQYEFCFNDDGTVETWIQTTNAHYKLLQPAKCYTSLYRPVNDCLNVITAIITLAPESTTMSLKDLLKVMDDKAQAVSYEEVERMSEFIVQHLDQWMETAPKKKSKLIEKSKVYIDLNNLAGIDMVSGVRPPPVRRVTGRSSAPKKRIVRNMNDAVLLHQNETTVTNWIHQLSAGMFGRALNVLGAETADVENLTCDPASAKFVVPQRRLHKRLKWETRGHIPVSEEEYKHIYQGKKYAKFFEAVRAVDESKLTIKLGDLVYVLDQDPKVTQTQFATAGREGRKKGAEKEKIQVRFGRVLSIRQPDSNSKDAQNVFIHVQWLVLGCDTILQEMASRRELFLTDSCDTVFADVIYGVAKLTPLGAKDIPTVEFHESMATMMGENEFFVRFKYNYQDGSFTDLKDVDAEQIGTLQPRVNTHRNPGYCSNCRIKYDNERTGDKWIYENDTEGEPRLFRSSKGWCIYAQEFVYLQPVEKQPGTTFRVGYISEINKSSVIVELLARVDDDDKSGHISYSDPRHLYFTGTDIKVTFDKIIRKCFVFHDSGDQKAKAPLMYGTLQRDLYYYRYEKRKGKAELVPVREIRSIHEQTLNDWESRTQIERHGAVSGKKLKGLDIFAGCGGLTLGLDLSGAVDTKWDIEFAPSAANTLALNFPDAQVFNQCANVLLSRAIQSEDEGSLDIEYDLQGRVLPDLPKKGEVDFIYGGPPCQGFSGVNRYKKGNDIKNSLVATFLSYVDHYKPRFVLLENVKGLITTKLGNSKNAEGKWEGGISNGVVKFIYRTLISMNYQCRIGLVQSGEYGVPQSRPRVIFLAARMGERLPDLPEPMHAFEVLDSQYALPHIKRYHTTQNGVAPLPRITIGEAVSDLPKFQYANPGVWPRHDPYSSAKAQPSDKTIEKFSVSKATSFVGYLLQPYHSRPQSEFQRRLRTKLVPSDEPAEKTSLLTTKLVTAHVTRLFNKETTQRIVCVPMWPGADHRSLPKEMRPWCLVDPNSQAEKHRFWPGLFGRLGMEDFFSTALTDVQPCGKQGKVLHPTQRRVYTVRELARAQGFPDWFAFTDGDADSGLGGVKKWHRNIGNAVPVPLGEQIGRCIGYSVWWKDDMIAQLREDGADEDEEMIDGNDQWVEELNTQMAADMPGLPLLVTHLLNLCVYRRLYGPNAKEFLPARVYDKKLEGGRRRLVWAML

SEQ ID NO: 614 - protein, 1454 aa, unidentified
  source 1..1454: note = Neurospora
MDSPDRSHGGMFIDVPAETMGFQEDYLDMFASVLSQGLAKEGDYAHHQPLPAGKEECLEPIAVATTITPSPDDPQLQLQLELEQQFQTESGLNGVDPAPAPESEDEADLPDGFSDESPDDDFVVQRSKHITVDLPVSTLINPRSTFQRIDENDNLVPPPQSTPERVAVEDLLKAAKAAGKNKEDYIEFELHDFNFYVNYAYHPQEMRPIQLVATKVLHDKYYFDGVLKYGNTKHYVTGMQVLELPVGNYGASLHSVKGQIWVRSKHNAKKEIYYLLKKPAFEYQRYYQPFLWIADLGKHVVDYCTRMVERKREVTLGCFKSDFIQWASKAHGKSKAFQNWRAQHPSDDFRTSVAANIGYIWKEINGVAGAKRAAGDQLFRELMIVKPGQYFRQEVPPGPVVTEGDRTVAATIVTPYIKECFGHMILGKVLRLAGEDAEKEKEVKLAKRLKIENKNATKADTKDDMKNDTATESLPTPLRSLPVQVLEATPIESDIVSIVSSDLPPSENNPPPLTNGSVKPKAKANPKPKPSTQPLHAAHVKYLSQELVNKIKVGDVISTPRDDSSNTDTKWKPTDTDDHRWFGLVQRVHTAKTKSSGRGLNSKSFDVIWFYRPEDTPCCAMKYKWRNELFLSNHCTCQEGHHARVKGNEVLAVHPVDWFGTPESNKGEFFVRQLYESEQRRWITLQKDHLTCYHNQPPKPPTAPYKPGDTVLATLSPSDKFSDPYEVVEYFTQGEKETAFVRLRKLLRRRKVDRQDAPANELVYTEDLVDVRAERIVGKCIMRCFRPDERVPSPYDRGGTGNMFFITHRQDHGRCVPLDTLPPTLRQGFNPLGNLGKPKLRGMDLYCGGGNFGRGLEEGGVVEMRWANDIWDKAIHTYMANTPDPNKTNPFLGSVDDLLRLALEGKFSDNVPRPGEVDFIAAGSPCPGFSLLTQDKKVLNQVKNQSLVASFASFVDFYRPKYGVLENVSGIVQTFVNRKQDVLSQLFCALVGMGYQAQLILGDAWAHGAPQSRERVFLYFAAPGLPLPDPPLPSHSHYRVKNRNIGFLCNGESYVQRSFIPTAFKFVSAGEGTADLPKIGDGKPDACVRFPDHRLASGITPYIRAQYACIPTHPYGMNFIKAWNNGNGVMSKSDRDLFPSEGKTRTSDASVGWKRLNPKTLFPTVTTTSNPSDARMGPGLHWDEDRPYTVQEMRRAQGYLDEEVLVGRTTDQWKLVGNSVSRHMALAIGLKFREAWLGTLYDESAVVATATATATTAAAVGVTVPVMEEPGIGTTESSRPSRSPVHTAVDLDDSKSERSRSTTPATVLSTSSAAGDGSANAAGLEDDDNDDMEMMEVTRKRSSPAVDEEGMRPSKVQKVEVTVASPASRRSSRQASRNPTASPSSKASKATTHEAPAPEELESDAESYSETYDKEGFDGDYHSGHEDQYSEEDEEEEYAEPETMTVNGMTIVKL

SEQ ID NO: 615 - protein, 345 aa, unidentified
  source 1..345: note = Drosophila
MVFRVLELFSGIGGMHYAFNYAQLDGQIVAALDVNTVANAVYAHNYGSNLVKTRNIQSLSVKEVTKLQANMLLMSPPCQPHTRQGLQRDTEDKRSDALTHLCGLIPECQELEYILMENVKGFESSQARNQFIESLERSGFHWREFILTPTQFNVPNTRYRYYCIARKGADFPFAGGKIWEEMPGAIAQNQGLSQIAEIVEENVSPDFLVPDDVLTKRVLVMDIIHPAQSRSMCFTKGYTHYTEGTGSAYTPLSEDESHRIFELVKEIDTSNQDASKSEKILQQRLDLLHQVRLRYFTPREVARLMSFPENFEFPPETTNRQKYRLLGNSINVKVVGELIKLLTIK

SEQ ID NO: 616 - protein, 330 aa, Schizosaccharomyces pombe
MLSTKRLRVLELYSGIGGMHYALNLANIPADIVCAIDINPQANEIYNLNHGKLAKHMDISTLTAKDFDAFDCKLWTMSPSCQPFTRIGNRKDILDPRSQAFLNILNVLPHVNNLPEYILIENVQGFEESKAAEECRKVLRNCGYNLIEGILSPNQFNIPNSRSRWYGLARLNFKGEWSIDDVFQFSEVAQKEGEVKRIRDYLEIERDWSSYMVLESVLNKWGHQFDIVKPDSSSCCCFTRGYTHLVQGAGSILQMSDHENTHEQFERNRMALQLRYFTAREVARLMGFPESLEWSKSNVTEKCMYRLLGNSINVKVVSYLISLLLEPLNF

SEQ ID NO: 617 - protein, 624 aa, unidentified
  source 1..624: note = Arabidopsis
MVMSHIFLISQIQEVEHGDSDDVNWNTDDDELAIDNFQFSPSPVHISATSPNSIQNRISDETVASFVEMGFSTQMIARAIEETAGANMEPMMILETLFNYSASTEASSSKSKVINHFIAMGFPEEHVIKAMQEHGDEDVGEITNALLTYAEVDKLRESEDMNININDDDDDNLYSLSSDDEEDELNNSSNEDRILQALIKMGYLREDAAIAIERCGEDASMEEVVDFICAAQMARQFDEIYAEPDKKELMNNNKKRRTYTETPRKPNTDQLISLPKEMIGFGVPNHPGLMMHRPVPIPDIARGPPFFYYENVAMTPKGVWAKISSHLYDIVPEFVDSKHFCAAARKRGYIHNLPIQNRFQIQPPQHNTIQEAFPLTKRWWPSWDGRTKLNCLLTCIASSRLTEKIREALERYDGETPLDVQKWVMYECKKWNLVWVGKNKLAPLDADEMEKLLGFPRDHTRGGGISTTDRYKSLGNSFQVDTVAYHLSVLKPLFPNGINVLSLFTGIGGGEVALHRLQIKMNVVVSVEISDANRNILRSFWEQTNQKGILREFKDVQKLDDNTIERLMDEYGGFDLVIGGSPCNNLAGGNRHHRVGLGGEHSSLFFDYCRILEAVRRKARHMRR

SEQ ID NO: 618 - protein, 626 aa, unidentified
  source 1..626: note = Arabidopsis
MVIWNNDDDDFLEIDNFQSSPRSSPIHAMQCRVENLAGVAVTTSSLSSPTETTDLVQMGFSDEVFATLFDMGFPVEMISRAIKETGPNVETSVIIDTISKYSSDCEAGSSKSKAIDHFLAMGFDEEKVVKAIQEHGEDNMEAIANALLSCPEAKKLPAAVEEEDGIDWSSSDDDTNYTDMLNSDDEKDPNSNENGSKIRSLVKMGFSELEASLAVERCGENVDIAELTDFLCAAQMAREFSEFYTEHEEQKPRHNIKKRRFESKGEPRSSVDDEPIRLPNPMIGFGVPNEPGLITHRSLPELARGPPFFYYENVALTPKGVWETISRHLFEIPPEFVDSKYFCVAARKRGYIHNLPINNRFQIQPPPKYTIHDAFPLSKRWWPEWDKRTKLNCILTCTGSAQLTNRIRVALEPYNEEPEPPKHVQRYVIDQCKKWNLVWVGKNKAAPLEPDEMESILGFPKNHTRGGGMSRTERFKSLGNSFQVDTVAYHLSVLKPIFPHGINVLSLFTGIGGGEVALHRLQIKMKLVVSVEISKVNRNILKDFWEQTNQTGELIEFSDIQHLTNDTIEGLMEKYGGFDLVIGGSPCNNLAGGNRVSRVGLEGDQSSLFFEYCRILEVVRARMRGS

SEQ ID NO: 619 - protein, 791 aa, unidentified
  source 1..791: note = Arabidopsis
MAARNKQKKRAEPESDLCFAGKPMSVVESTIRWPHRYQSKKTKLQAPTKKPANKGGKKEDEEIIKQAKCHFDKALVDGVLINLNDDVYVTGLPGKLKFIAKVIELFEADDGVPYCRFRWYYRPEDTLIERFSHLVQPKRVFLSNDENDNPLTCIWSKVNIAKVPLPKITSRIEQRVIPPCDYYYDMKYEVPYLNFTSADDGSDASSSLSSDSALNCFENLHKDEKFLLDLYSGCGAMSTGFCMGASISGVKLITKWSVDINKFACDSLKLNHPETEVRNEAAEDFLALLKEWKRLCEKFSLVSSTEPVESISELEDEEVEENDDIDEASTGAELEPGEFEVEKFLGIMFGDPQGTGEKTLQLMVRWKGYNSSYDTWEPYSGLGNCKEKLKEYVIDGFKSHLLPLPGTVYTVCGGPPCQGISGYNRYRNNEAPLEDQKNQQLLVFLDIIDFLKPNYVLMENVVDLLRFSKGFLARHAVASFVAMNYQTRLGMMAAGSYGLPQLRNRVFLWAAQPSEKLPPYPLPTHEVAKKFNTPKEFKDLQVGRIQMEFLKLDNALTLADAISDLPPVTNYVANDVMDYNDAAPKTEFENFISLKRSETLLPAFGGDPTRRLFDHQPLVLGDDDLERVSYIPKQKGANYRDMPGVLVHNNKAEINPRFRAKLKSGKNVVPAYAISFIKGKSKKPFGRLWGDEIVNTVVTRAEPHNQCVIHPMQNRVLSVRENARLQGFPDCYKLCGTIKEKYIQVGNAVAVPVGVALGYAFGMASQGLTDDEPVIKLPFKYPECMQAKDQI

SEQ ID NO: 620 - protein, 1295 aa, unidentified
  source 1..1295: note = Arabidopsis
MLSPAKCESEEAQAPLDLHSSSRSEPECLSLVLWCPNPEEAAPSSTRELIKLPDNGEMSLRRSTTLNCNSPEENGGEGRVSQRKSSRGKSQPLLMLTNGCQLRRSPRFRALHANFDNVCSVPVTKGGVSQRKFSRGKSQPLLTLTNGCQLRRSPRFRAVDGNFDSVCSVPVTGKFGSRKRKSNSALDKKESSDSEGLTFKDIAVIAKSLEMEIISECQYKNNVAEGRSRLQDPAKRKVDSDTLLYSSINSSKQSLGSNKRMRRSQRFMKGTENEGEENLGKSKGKGMSLASCSFRRSTRLSGTVETGNTETLNRRKDCGPALCGAEQVRGTERLVQISKKDHCCEAMKKCEGDGLVSSKQELLVFPSGCIKKTVNGCRDRTLGKPRSSGLNTDDIHTSSLKISKNDTSNGLTMTTALVEQDAMESLLQGKTSACGAADKGKTREMHVNSTVIYLSDSDEPSSIEYLNGDNLTQVESGSALSSGGNEGIVSLDLNNPTKSTKRKGKRVTRTAVQEQNKRSICFFIGEPLSCEEAQERWRWRYELKERKSKSRGQQSEDDEDKIVANVECHYSQAKVDGHTFSLGDFAYIKGEEEETHVGQIVEFFKTTDGESYFRVQWFYRATDTIMERQATNHDKRRLFYSTVMNDNPVDCLISKVTVLQVSPRVGLKPNSIKSDYYFDMEYCVEYSTFQTLRNPKTSENKLECCADVVPTESTESILKKKSFSGELPVLDLYSGCGGMSTGLSLGAKISGVDVVTKWAVDQNTAACKSLKLNHPNTQVRNDAAGDFLQLLKEWDKLCKRYVFNNDQRTDTLRSVNSTKETSGSSSSSDDDSDSEEYEVEKLVDICFGDHDKTGKNGLKFKVHWKGYRSDEDTWELAEELSNCQDAIREFVTSGFKSKILPLPGRVGVICGGPPCQGISGYNRHRNVDSPLNDERNQQIIVFMDIVEYLKPSYVLMENVVDILRMDKGSLGRYALSRLVNMRYQARLGIMTAGCYGLSQFRSRVFMWGAVPNKNLPPFPLPTHDVIVRYGLPLEFERNVVAYAEGQPRKLEKALVLKDAISDLPHVSNDEDREKLPYESLPKTDFQRYIRSTKRDLTGSAIDNCNKRTMLLHDHRPFHINEDDYARVCQIPKRKGANFRDLPGLIVRNNTVCRDPSMEPVILPSGKPLVPGYVFTFQQGKSKRPFARLWWDETVPTVLTVPTCHSQALLHPEQDRVLTIRESARLQGFPDYFQFCGTIKERYCQIGNAVAVSVSRALGYSLGMAFRGLARDEHLIKLPQNFSHSTYPQLQETIPH

SEQ ID NO: 621 - protein, 839 aa, unidentified
  source 1..839: note = Arabidopsis
MAPKRKRPATKDDTTKSIPKPKKRAPKRAKTVKEEPVTVVEEGEKHVARFLDEPIPESEAKSTWPDRYKPIEVQPPKASSRKKTKDDEKVEIIRARCHYRRAIVDERQIYELNDDAYVQSGEGKDPFICKIIEMFEGANGKLYFTARWFYRPSDTVMKEFEILIKKKRVFFSEIQDTNELGLLEKKLNILMIPLNENTKETIPATENCDFFCDMNYFLPYDTFEAIQQETMMAISESSTISSDTDIREGAAAISEIGECSQETEGHKKATLLDLYSGCGAMSTGLCMGAQLSGLNLVTKWAVDMNAHACKSLQHNHPETNVRNMTAEDFLFLLKEWEKLCIHFSLRNSPNSEEYANLHGLNNVEDNEDVSEESENEDDGEVFTVDKIVGISFGVPKKLLKRGLYLKVRWLNYDDSHDTWEPIEGLSNCRGKIEEFVKLGYKSGILPLPGGVDVVCGGPPCQGISGHNRFRNLLDPLEDQKNKQLLVYMNIVEYLKPKFVLMENVVDMLKMAKGYLARFAVGRLLQMNYQVRNGMMAAGAYGLAQFRLRFFLWGALPSEIIPQFPLPTHDLVHRGNIVKEFQGNIVAYDEGHTVKLADKLLLKDVISDLPAVANSEKRDEITYDKDPTTPFQKFIRLRKDEASGSQSKSKSKKHVLYDHHPLNLNINDYERVCQVPKRKGANFRDFPGVIVGPGNVVKLEEGKERVKLESGKTLVPDYALTYVDGKSCKPFGRLWWDEIVPTVVTRAEPHNQVIIHPEQNRVLSIRENARLQGFPDDYKLFGPPKQKYIQVGNAVAVPVAKALGYALGTAFQGLAVGKDPLLTLPEGFAFMKPTLPSELA

SEQ ID NO: 622 - protein, 142 aa, unidentified
  source 1..142: note = Neurospora
MAEQNPFVIDDEDDVIQIHDEEEVEEEVAEVIDITEDDIEPSELDRAFGSRPKEETLPSLLLRDQGFIVRPGMTVELKAPIGRFAISFVRVNSIVKVRQAHVNNVTIRGHGFTRAKEMNGMLPKQLNECCLVASIDTRDPRP

SEQ ID NO: 623 - protein, 529 aa, Escherichia coli
  source 1..529: note = strain 12
MNNNDLVAKLWKLCDNLRDGGVSYQNYVNELASLLFLKMCKETGQEAEYLPEGYRWDDLKSRIGQEQLQFYRKMLVHLGEDDKKLVQAVFHNVSTTITEPKQITALVSNMDSLDWYNGAHGKSRDDFGDMYEGLLQKNANETKSGAGQYFTPRPLIKTIIHLLKPQPREVVQDPAAGTAGFLIEADRYVKSQTNDLDDLDGDTQDFQIHRAFIGLELVPGTRRLALMNCLLHDIEGNLDHGGAIRLGNTLGSDGENLPKAHIVATNPPFGSAAGTNITRTFVHPTSNKQLCFMQHIIETLHPGGRAAVVVPDNVLFEGGKGTDIRRDLMDKCHLHTILRLPTGIFYAQGVKTNVLFFTKGTVANPNQDKNCTDDVWVYDLRTNMPSFGKRTPFTDEHLQPFERVYGEDPHGLSPRTEGEWSFNAEETEVADSEENKNTDQHLATSRWRKFSREWIRTAKSDSLDISWLKDKDSIDADSLPEPDVLAAEAMGELVQALSELDALMRELGASDEADLQRQLLEEAFGGVKE

SEQ ID NO: 624 - protein, 464 aa, Escherichia coli
  source 1..464: note = strain 12
MSAGKLPEGWVIAPVSTVTTLIRGVTYKKEQAINYLKDDYLPLIRANNIQNGKFDTTDLVFVPKNLVKESQKISPEDIVIAMSSGSKSVVGKSAHQHLPFECSFGAFCGVLRPEKLIFSGFIAHFTKSSLYRNKISSLSAGANINNIKPASFDLINIPIPPLAEQKIIAEKLDTLLAQVDSTKARFEQIPQILKRFRQAVLGGAVNGKLTEKWRNFEPQHSVFKKLNFESILTELRNGLSSKPNESGVGHPILRISSVRAGHVDQNDIRFLECSESELNRHKLQDGDLLFTRYNGSLEFVGVCGLLKKLQHQNLLYPDKLIRARLTKDALPEYIEIFFSSPSARNAMMNCVKTTSGQKGISGKDIKSQVVLLPPVKEQAEIVRRVEQLFAYADTIEKQVNNALARVNNLTQSILAKAFRGELTAQWRAENPDLISGENSAAALLEKIKAERAASGGKKASRKKS

SEQ ID NO: 625 - protein, 421 aa, Thermus aquaticus
MGLPPLLSLPSNSAPRSLGRVETPPEVVDFMVSLAEAPRGGRVLEPACAHGPFLRAFREAHGTAYRFVGVEIDPKALDLPPWAEGILADFLLWEPGEAFDLILGNPPYGIVGEASKYPIHVFKAVKDLYKKAFSTWKGKYNLYGAFLEKAVRLLKPGGVLVFVVPATWLVLEDFALLREFLAREGKTSVYYLGEVFPQKKVSAVVIRFQKSGKGLSLWDTQESESGFTPILWAEYPHWEGEIIRFETEETRKLEISGMPLGDLFHIRFAARSPEFKKHPAVRKEPGPGLVPVLTGRNLKPGWVDYEKNHSGLWMPKERAKELRDFYATPHLVVAHTKGTRVVAAWDERAYPWREEFHLLPKEGVRLDPSSLVQWLNSEAMQKHVRTLYRDFVPHLTLRMLERLPVRREYGFHTSPESARNF

SEQ ID NO: 626 - protein, 278 aa, Escherichia coli
MKKNRAFLKWAGGKYPLLDDIKRHLPKGECLVEPFVGAGSVFLNTDFSRYILADINSDLISLYNIVKMRTDEYVQAARELFVPETNCAEVYYQFREEFNKSQDPFRRAVLFLYLNRYGYNGLCRYNLRGEFNVPFGRYKKPYFPEAELYHFAEKAQNAFFYCESYADSMARADDASVVYCDPPYAPLSATANFTAYHTNSFTLEQQAHLAEIAEGLVERHIPVLISNHDTMLTREWYQRAKLHVVKVRRSISSNGGTRKKVDELLALYKPGVVSPAKK

SEQ ID NO: 627 - protein, 358 aa, Caulobacter vibrioides
MKFGPETIIHGDCIEQMNALPEKSVDLIFADPPYNLQLGGDLLRPDNSKVDAVDDHWDQFESFAAYDKFTREWLKAARRVLKDDGAIWVIGSYHNIFRVGVAVQDLGFWILNDIVWRKSNPMPNFKGTRFANAHETLIWASKSQNAKRYTFNYDALKMANDEVQMRSDWTIPLCTGEERIKGADGQKAHPTQKPEALLYRVILSTTKPGDVILDPFFGVGTTGAAAKRLGRKFIGIEREAEYLEHAKARIAKVVPIAPEDLDVMGSKRAEPRVPFGTIVEAGLLSPGDTLYCSKGTHVAKVRPDGSITVGDLSGSIHKIGALVQSAPACNGWTYWHFKTDAGLAPIDVLRAQVRAGMN

SEQ ID NO: 628 - protein, 577 aa, Clostridioides difficile
MDDISQDNFLLSKEYENSLDVDTKKASGIYYTPKIIVDYIVKKTLKNHDIIKNPYPRILDISCGCGNFLLEVYDILYDLFEENIYELKKKYDENYWTVDNIHRHILNYCIYGADIDEKAISILKDSLTNKKVVNDLDESDIKINLFCCDSLKKKWRYKFDYIVGNPPYIGHKKLEKKYKKFLLEKYSEVYKDKADLYFCFYKKIIDILKQGGIGSVITPRYFLESLSGKDLREYIKSNVNVQEIVDFLGANIFKNIGVSSCILTFDKKKTKETYIDVFKIKNEDICINKFETLEELLKSSKFEHFNINQRLLSDEWILVNKDDETFYNKIQEKCKYSLEDIAISFQGIITGCDKAFILSKDDVKLNLVDDKFLKCWIKSKNINKYIVDKSEYRLIYSNDIDNENTNKRILDEIIGLYKTKLENRRECKSGIRKWYELQWGREKLFFERKKIMYPYKSNENRFAIDYDNNFSSADVYSFFIKEEYLDKFSYEYLVGILNSSVYDKYFKITAKKMSKNIYDYYPNKVMKIRIFRDNNYEEIENLSKQIISILLNKSIDKGKVEKLQIKMDNLIMDSLGI

SEQ ID NO: 629 - protein, 835 aa, synthetic construct
MAASAAAASAAAASAASGSPGPGEGSAGGEKRSTAPSAAASASASAAASSPAGGGAEALELLEHCGVCRERLRPEREPRLLPCLHSACSACLGPAAPAAANSSGDGGAAGDGTVVDCPVCKQQCFSKDIVENYFMRDSGSKAATDAQDANQCCTSCEDNAPATSYCVECSEPLCETCVEAHQRVKYTKDHTVRSTGPAKSRDGERTVYCNVHKHEPLVLFCESCDTLTCRDCQLNAHKDHQYQFLEDAVRNQRKLLASLVKRLGDKHATLQKSTKEVRSSIRQVSDVQKRVQVDVKMAILQIMKELNKRGRVLVNDAQKVTEGQQERLERQHWTMTKIQKHQEHILRFASWALESDNNTALLLSKKLIYFQLHRALKMIVDPVEPHGEMKFQWDLNAWTKSAEAFGKIVAERPGTNSTGPAPMAPPRAPGPLSKQGSGSSQPMEVQEGYGFGSGDDPYSSAEPHVSGVKRSRSGEGEVSGLMRKVPRVSLERLDLDLTADSQPPVFKVFPGSTTEDYNLIVIERGAAAAATGQPGTAPAGTPGAPPLAGMAIVKEEETEAAIGAPPTATEGPETKPVLMALAEGPGAEGPRLASPSGSTSSGLEVVAPEGTSAPGGGPGTLDDSATICRVCQKPGDLVMCNQCEFCFHLDCHLPALQDVPGEEWSCSLCHVLPDLKEEDGSLSLDGADSTGVVAKLSPANQRKCERVLLALFCHEPCRPLHQLATDSTFSLDQPGGTLDLTLIRARLQEKLSPPYSSPQEFAQDVGRMFKQFNKLTEDKADVQSIIGLQRFFETRMNEAFGDTKFSAVLVEPPPMSLPGAGLSSQELSGGPGDGP

SEQ ID NO: 630 - protein, 486 aa, synthetic construct
MVAGMLGLREEKSEDQDLQGLKDKPLKFKKVKKDKKEEKEGKHEPVQPSAHHSAEPAEAGKAETSEGSGSAPAVPEASASPKQRRSIIRDRGPMYDDPTLPEGWTRKLKQRKSGRSAGKYDVYLINPQGKAFRSKVELIAYFEKVGDTSLDPNDFDFTVTGRGSPSRREQKPPKKPKSPKAPGTGRGRGRPKGSGTTRPKAATSEGVQVKRVLEKSPGKLLVKMPFQTSPGGKAEGGGATTSTQVMVIKRPGRKRKAEADPQAIPKKRGRKPGSVVAAAAAEAKKKAVKESSIRSVQETVLPIKKRKTRETVSIEVKEVVKPLLVSTLGEKSGKGLKTCKSPGRKSKESSPKGRSSSASSPPKKEHHHHHHHSESPKAPVPLLPPLPPPPPEPESSEDPTSPPEPQDLSSSVCKEEKMPRGGSLESDGCPKEPAKTQPAVATAATAAEKYKHRGEGERKDIVSSSMPRPNREEPVDSRTPVTERVS

SEQ ID NO: 631 - protein, 4 aa, synthetic construct
SGGS

SEQ ID NO: 632 - protein, 24 aa, synthetic construct
SGGSSGSETPGTSESATPESSGGS

SEQ ID NO: 633 - protein, 32 aa, synthetic construct
SGGSSGGSSGSETPGTSESATPESSGGSSGGS

SEQ ID NO: 634 - protein, 104 aa, synthetic construct
GGSGGSPGSPAGSPTSTEEGTSESATPESGPGTSTEPSEGSAPGSPAGSPTSTEEGTSTEPSEGSAPGTSTEPSEGSAPGTSESATPESGPGSEPATSGGSGGS

SEQ ID NO: 635 - protein, 5 aa, synthetic construct
GSGGG

SEQ ID NO: 636 - protein, 20 aa, synthetic construct
GGGGSGGGGSGGGGSGGGGS

SEQ ID NO: 637 - protein, 27 aa, synthetic construct
SSGNSNANSRGPSFSSGLVPLSLRGSH

SEQ ID NO: 638 - protein, 16 aa, synthetic construct
SGSETPGTSESATPES

SEQ ID NO: 639 - protein, 24 aa, synthetic construct
SGGSSGGSSGSETPGTSESATPES

SEQ ID NO: 640 - protein, 40 aa, synthetic construct
SGGSSGGSSGSETPGTSESATPESSGGSSGGSSGGSSGGS

SEQ ID NO: 641 - protein, 64 aa, synthetic construct
SGGSSGGSSGSETPGTSESATPESSGGSSGGSSGGSSGGSSGSETPGTSESATPESSGGSSGGS

SEQ ID NO: 642 - protein, 92 aa, synthetic construct
PGSPAGSPTSTEEGTSESATPESGPGTSTEPSEGSAPGSPAGSPTSTEEGTSTEPSEGSAPGTSTEPSEGSAPGTSESATPESGPGSEPATS

SEQ ID NO: 643 - protein, 80 aa, synthetic construct
GGPSSGAPPPSGGSPAGSPTSTEEGTSESATPESGPGTSTEPSEGSAPGSPAGSPTSTEEGTSTEPSEGSAPGTSTEPSE

SEQ ID NO: 644 - protein, 7 aa, synthetic construct
PKKKRKV

SEQ ID NO: 645 - protein, 20 aa, synthetic construct
AVKRPAATKKAGQAKKKKLD

SEQ ID NO: 646 - protein, 25 aa, synthetic construct
MSRRRKANPTKLSENAKKLAKEVEN

SEQ ID NO: 647 - protein, 9 aa, synthetic construct
PAAKRVKLD

SEQ ID NO: 648 - protein, 9 aa, synthetic construct
KLKIKRPVK

SEQ ID NO: 649 - protein, 30 aa, synthetic construct
MDSLLMNRRKFLYQFKNVRWAKGRRETYLC

SEQ ID NO: 650 - protein, 665 aa, synthetic construct
  VARIANT 27..28: note = may be TR, LR or LK
  VARIANT 55..56: note = may be TR, LR or LK
  VARIANT 64..308: note = may be absent
  VARIANT 328..329: note = may be TR, LR or LK
  VARIANT 356..357: note = may be TR, LR or LK
  VARIANT 365..609: note = may be absent
  VARIANT 630..631: note = may be TR, LR or LK
  VARIANT 658..659: note = may be TR, LR or LK
SRPGERPFQCRICMRNFSXXXXXXXHXXTHTGEKPFQCRICMRNFSXXXXXXXHXXTHXXXXXXXXXXXXXXXXXXXXXXXXXXXXXXXXXXXXXXXXXXXXXXXXXXXXXXXXXXXXXXXXXXXXXXXXXXXXXXXXXXXXXXXXXXXXXXXXXXXXXXXXXXXXXXXXXXXXXXXXXXXXXXXXXXXXXXXXXXXXXXXXXXXXXXXXXXXXXXXXXXXXXXXXXXXXXXXXXXXXXXXXXXXXXXXXXXXXXXXXXXXXXXXXXXXXXXXXXXXXXXXXXXXXXXXXXXXXXXXXXXXXXXXXXXFQCRICMRNFSXXXXXXXHXXTHTGEKPFQCRICMRNFSXXXXXXXHXXTHXXXXXXXXXXXXXXXXXXXXXXXXXXXXXXXXXXXXXXXXXXXXXXXXXXXXXXXXXXXXXXXXXXXXXXXXXXXXXXXXXXXXXXXXXXXXXXXXXXXXXXXXXXXXXXXXXXXXXXXXXXXXXXXXXXXXXXXXXXXXXXXXXXXXXXXXXXXXXXXXXXXXXXXXXXXXXXXXXXXXXXXXXXXXXXXXXXXXXXXXXXXXXXXXXXXXXXXXXXXXXXXXXXXXXXXXXXXXXXXXXXXXXXXXXXPFQCRICMRNFSXXXXXXXHXXTHTGEKPFQCRICMRNFSXXXXXXXHXXTHLRGS

SEQ ID NO: 651 - protein, 6 aa, synthetic construct
TGSQKP

SEQ ID NO: 652 - protein, 9 aa, synthetic construct
TGGGGSQKP

SEQ ID NO: 653 - RNA, 93 nt, synthetic construct
  source 1..93: mol_type = other RNA
gtttaagagctatgctggaaacagcatagcaagtttaaataaggctagtccgttatcaacttgaaaaagtggcaccgagtcggtgcttttttt

SEQ ID NO: 654 - RNA, 80 nt, synthetic construct
  source 1..80: mol_type = other RNA
gttttagagctagaaatagcaagttaaaataaggctagtccgttatcaacttgaaaaagtggcaccgagtcggtgctttt

SEQ ID NO: 655 - RNA, 92 nt, synthetic construct
  source 1..92: mol_type = other RNA
gtttaagagctaagctggaaacagcatagcaagtttaaataaggctagtccgttatcaacttgaaaaagtggcaccgagtcggtgctttttt

SEQ ID NO: 656 - RNA, 93 nt, synthetic construct
  source 1..93: mol_type = other RNA
gtttaagagctaagctggaaacagcatagcaagtttaaataaggctagtccgttatcaacttgaaaaagtggcaccgagtcggtgcttttttt

SEQ ID NO: 657 - protein, 25 aa, synthetic construct
  VARIANT 4: note = may be absent
  VARIANT 23: note = may be absent
  VARIANT 5: note = may be absent
  VARIANT 24: note = may be absent
CXXXXCXXXXXXXXXXXXHXXXXXH

SEQ ID NO: 658 - protein, 2087 aa, synthetic construct
MNHDQEFDPPKVYPPVPAEKRKPIRVLSLFDGIATGLLVLKDLGIQVDRYIASEVCEDSITVGMVRHQGKIMYVGDVRSVTQKHIQEWGPFDLVIGGSPCNDLSIVNPARKGLYEGTGRLFFEFYRLLHDARPKEGDDRPFFWLFENVVAMGVSDKRDISRFLESNPVMIDAKEVSAAHRARYFWGNLPGMNRPLASTVNDKLELQECLEHGRIAKFSKVRTITTRSNSIKQGKDQHFPVFMNEKEDILWCTEMERVFGFPVHYTDVSNMSRLARQRLLGRSWSVPVIRHLFAPLKEYFACVSSGNSNANSRGPSFSSGLVPLSLRGSHMGPMEIYKTVSAWKRQPVRVLSLFRNIDKVLKSLGFLESGSGSGGGTLKYVEDVTNVVRRDVEKWGPFDLVYGSTQPLGSSCDRCPGWYMFQFHRILQYALPRQESQRPFFWIFMDNLLLTEDDQETTTRFLQTEAVTLQDVRGRDYQNAMRVWSNIPGLKSKHAPLTPKEEEYLQAQVRSRSKLDAPKVDLLVKNCLLPLREYFKYFSQNSLPLGGPSSGAPPPSGGSPAGSPTSTEEGTSESATPESGPGTSTEPSEGSAPGSPAGSPTSTEEGTSTEPSEGSAPGTSTEPSEPKKKRKVYMDKKYSIGLAIGTNSVGWAVITDEYKVPSKKFKVLGNTDRHSIKKNLIGALLFDSGETAEATRLKRTARRRYTRRKNRICYLQEIFSNEMAKVDDSFFHRLEESFLVEEDKKHERHPIFGNIVDEVAYHEKYPTIYHLRKKLVDSTDKADLRLIYLALAHMIKFRGHFLIEGDLNPDNSDVDKLFIQLVQTYNQLFEENPINASGVDAKAILSARLSKSRRLENLIAQLPGEKKNGLFGNLIALSLGLTPNFKSNFDLAEDAKLQLSKDTYDDDLDNLLAQIGDQYADLFLAAKNLSDAILLSDILRVNTEITKAPLSASMIKRYDEHHQDLTLLKALVRQQLPEKYKEIFFDQSKNGYAGYIDGGASQEEFYKFIKPILEKMDGTEELLVKLNREDLLRKQRTFDNGSIPHQIHLGELHAILRRQEDFYPFLKDNREKIEKILTFRIPYYVGPLARGNSRFAWMTRKSEETITPWNFEEVVDKGASAQSFIERMTNFDKNLPNEKVLPKHSLLYEYFTVYNELTKVKYVTEGMRKPAFLSGEQKKAIVDLLFKTNRKVTVKQLKEDYFKKIECFDSVEISGVEDRFNASLGTYHDLLKIIKDKDFLDNEENEDILEDIVLTLTLFEDREMIEERLKTYAHLFDDKVMKQLKRRRYTGWGRLSRKLINGIRDKQSGKTILDFLKSDGFANRNFMQLIHDDSLTFKEDIQKAQVSGQGDSLHEHIANLAGSPAIKKGILQTVKVVDELVKVMGRHKPENIVIEMARENQTTQKGQKNSRERMKRIEEGIKELGSQILKEHPVENTQLQNEKLYLYYLQNGRDMYVDQELDINRLSDYDVDAIVPQSFLKDDSIDNKVLTRSDKNRGKSDNVPSEEVVKKMKNYWRQLLNAKLITQRKFDNLTKAERGGLSELDKAGFIKRQLVETRQITKHVAQILDSRMNTKYDENDKLIREVKVITLKSKLVSDFRKDFQFYKVREINNYHHAHDAYLNAVVGTALIKKYPKLESEFVYGDYKVYDVRKMIAKSEQEIGKATAKYFFYSNIMNFFKTEITLANGEIRKRPLIETNGETGEIVWDKGRDFATVRKVLSMPQVNIVKKTEVQTGGFSKESILPKRNSDKLIARKKDWDPKKYGGFDSPTVAYSVLVVAKVEKGKSKKLKSVKELLGITIMERSSFEKNPIDFLEAKGYKEVKKDLIIKLPKYSLFELENGRKRMLASAGELQKGNELALPSKYVNFLYLASHYEKLKGSPEDNEQKQLFVEQHKHYLDEIIEQISEFSKRVILADANLDKVLSAYNKHRDKPIREQAENIIHLFTLTNLGAPAAFKYFDTTIDRKRYTSTKEVLDATLIHQSITGLYETRIDLSQLGGDPKKKRKVSGSETPGTSESATPESTGRTLVTFKDVFVDFTREEWKLLDTAQQIVYRNVMLENYKNLVSLGYQLTKPDVILRLEKGEEP

SEQ ID NO: 659 - protein, 1385 aa, synthetic construct
  VARIANT 659..660: note = may be TR, LR or LK
  VARIANT 687..688: note = may be TR, LR or LK
  VARIANT 961..962: note = may be TR, LR or LK
  VARIANT 989..990: note = may be TR, LR or LK
  VARIANT 696..940: note = may be absent
  VARIANT 998..1242: note = may be absent
  VARIANT 1263..1264: note = may be TR, LR or LK
  VARIANT 1291..1292: note = may be TR, LR or LK
MNHDQEFDPPKVYPPVPAEKRKPIRVLSLFDGIATGLLVLKDLGIQVDRYIASEVCEDSITVGMVRHQGKIMYVGDVRSVTQKHIQEWGPFDLVIGGSPCNDLSIVNPARKGLYEGTGRLFFEFYRLLHDARPKEGDDRPFFWLFENVVAMGVSDKRDISRFLESNPVMIDAKEVSAAHRARYFWGNLPGMNRPLASTVNDKLELQECLEHGRIAKFSKVRTITTRSNSIKQGKDQHFPVFMNEKEDILWCTEMERVFGFPVHYTDVSNMSRLARQRLLGRSWSVPVIRHLFAPLKEYFACVSSGNSNANSRGPSFSSGLVPLSLRGSHMGPMEIYKTVSAWKRQPVRVLSLFRNIDKVLKSLGFLESGSGSGGGTLKYVEDVTNVVRRDVEKWGPFDLVYGSTQPLGSSCDRCPGWYMFQFHRILQYALPRQESQRPFFWIFMDNLLLTEDDQETTTRFLQTEAVTLQDVRGRDYQNAMRVWSNIPGLKSKHAPLTPKEEEYLQAQVRSRSKLDAPKVDLLVKNCLLPLREYFKYFSQNSLPLGGPSSGAPPPSGGSPAGSPTSTEEGTSESATPESGPGTSTEPSEGSAPGSPAGSPTSTEEGTSTEPSEGSAPGTSTEPSEPKKKRKVYSRPGERPFQCRICMRNFSXXXXXXXHXXTHTGEKPFQCRICMRNFSXXXXXXXHXXTHXXXXXXXXXXXXXXXXXXXXXXXXXXXXXXXXXXXXXXXXXXXXXXXXXXXXXXXXXXXXXXXXXXXXXXXXXXXXXXXXXXXXXXXXXXXXXXXXXXXXXXXXXXXXXXXXXXXXXXXXXXXXXXXXXXXXXXXXXXXXXXXXXXXXXXXXXXXXXXXXXXXXXXXXXXXXXXXXXXXXXXXXXXXXXXXXXXXXXXXXXXXXXXXXXXXXXXXXXXXXXXXXXXXXXXXXXXXXXXXXXXXXXXXXXXPFQCRICMRNFSXXXXXXXHXXTHTGEKPFQCRICMRNFSXXXXXXXHXXTHXXXXXXXXXXXXXXXXXXXXXXXXXXXXXXXXXXXXXXXXXXXXXXXXXXXXXXXXXXXXXXXXXXXXXXXXXXXXXXXXXXXXXXXXXXXXXXXXXXXXXXXXXXXXXXXXXXXXXXXXXXXXXXXXXXXXXXXXXXXXXXXXXXXXXXXXXXXXXXXXXXXXXXXXXXXXXXXXXXXXXXXXXXXXXXXXXXXXXXXXXXXXXXXXXXXXXXXXXXXXXXXXXXXXXXXXXXXXXXXXXXXXXXXXXXPFQCRICMRNFSXXXXXXXHXXTHTGEKPFQCRICMRNFSXXXXXXXHXXTHLRGSPKKKRKVSGSETPGTSESATPESTGRTLVTFKDVFVDFTREEWKLLDTAQQIVYRNVMLENYKNLVSLGYQLTKPDVILRLEKGEEP

SEQ ID NO: 660 - protein, 2298 aa, synthetic construct
MGTMPKKKRKVPKKKRKVYNHDQEFDPPKVYPPVPAEKRKPIRVLSLFDGIATGLLVLKDLGIQVDRYIASEVCEDSITVGMVRHQGKIMYVGDVRSVTQKHIQEWGPFDLVIGGSPCNDLSIVNPARKGLYEGTGRLFFEFYRLLHDARPKEGDDRPFFWLFENVVAMGVSDKRDISRFLESNPVMIDAKEVSAAHRARYFWGNLPGMNRPLASTVNDKLELQECLEHGRIAKFSKVRTITTRSNSIKQGKDQHFPVFMNEKEDILWCTEMERVFGFPVHYTDVSNMSRLARQRLLGRSWSVPVIRHLFAPLKEYFACVSSGNSNANSRGPSFSSGLVPLSLRGSHMAAIPALDPEAEPSMDVILVGSSELSSSVSPGTGRDLIAYEVKANQRNIEDICICCGSLQVHTQHPLFEGGICAPCKDKFLDALFLYDDDGYQSYCSICCSGETLLICGNPDCTRCYCFECVDSLVGPGTSGKVHAMSNWVCYLCLPSSRSGLLQRRRKWRSQLKAFYDRESENPLEMFETVPVWRRQPVRVLSLFEDIKKELTSLGFLESGSDPGQLKHVVDVTDTVRKDVEEWGPFDLVYGATPPLGHTCDRPPSWYLFQFHRLLQYARPKPGSPRPFFWMFVDNLVLNKEDLDVASRFLEMEPVTIPDVHGGSLQNAVRVWSNIPAIRSRHWALVSEEELSLLAQNKQSSKLAAKWPTKLVKNCFLPLREYFKYFSTELTSSLGGPSSGAPPPSGGSPAGSPTSTEEGTSESATPESGPGTSTEPSEGSAPGSPAGSPTSTEEGTSTEPSEGSAPGTSTEPSELEDKKYSIGLAIGTNSVGWAVITDEYKVPSKKFKVLGNTDRHSIKKNLIGALLFDSGETAEATRLKRTARRRYTRRKNRICYLQEIFSNEMAKVDDSFFHRLEESFLVEEDKKHERHPIFGNIVDEVAYHEKYPTIYHLRKKLVDSTDKADLRLIYLALAHMIKFRGHFLIEGDLNPDNSDVDKLFIQLVQTYNQLFEENPINASGVDAKAILSARLSKSRRLENLIAQLPGEKKNGLFGNLIALSLGLTPNFKSNFDLAEDAKLQLSKDTYDDDLDNLLAQIGDQYADLFLAAKNLSDAILLSDILRVNTEITKAPLSASMIKRYDEHHQDLTLLKALVRQQLPEKYKEIFFDQSKNGYAGYIDGGASQEEFYKFIKPILEKMDGTEELLVKLNREDLLRKQRTFDNGSIPHQIHLGELHAILRRQEDFYPFLKDNREKIEKILTFRIPYYVGPLARGNSRFAWMTRKSEETITPWNFEEVVDKGASAQSFIERMTNFDKNLPNEKVLPKHSLLYEYFTVYNELTKVKYVTEGMRKPAFLSGEQKKAIVDLLFKTNRKVTVKQLKEDYFKKIECFDSVEISGVEDRFNASLGTYHDLLKIIKDKDFLDNEENEDILEDIVLTLTLFEDREMIEERLKTYAHLFDDKVMKQLKRRRYTGWGRLSRKLINGIRDKQSGKTILDFLKSDGFANRNFMQLIHDDSLTFKEDIQKAQVSGQGDSLHEHIANLAGSPAIKKGILQTVKVVDELVKVMGRHKPENIVIEMARENQTTQKGQKNSRERMKRIEEGIKELGSQILKEHPVENTQLQNEKLYLYYLQNGRDMYVDQELDINRLSDYDVDAIVPQSFLKDDSIDNKVLTRSDKNRGKSDNVPSEEVVKKMKNYWRQLLNAKLITQRKFDNLTKAERGGLSELDKAGFIKRQLVETRQITKHVAQILDSRMNTKYDENDKLIREVKVITLKSKLVSDFRKDFQFYKVREINNYHHAHDAYLNAVVGTALIKKYPKLESEFVYGDYKVYDVRKMIAKSEQEIGKATAKYFFYSNIMNFFKTEITLANGEIRKRPLIETNGETGEIVWDKGRDFATVRKVLSMPQVNIVKKTEVQTGGFSKESILPKRNSDKLIARKKDWDPKKYGGFDSPTVAYSVLVVAKVEKGKSKKLKSVKELLGITIMERSSFEKNPIDFLEAKGYKEVKKDLIIKLPKYSLFELENGRKRMLASAGELQKGNELALPSKYVNFLYLASHYEKLKGSPEDNEQKQLFVEQHKHYLDEIIEQISEFSKRVILADANLDKVLSAYNKHRDKPIREQAENIIHLFTLTNLGAPAAFKYFDTTIDRKRYTSTKEVLDATLIHQSITGLYETRIDLSQLGGDSPKKKRKVGVDGSSGSETPGTSESATPESRTLVTFKDVFVDFTREEWKLLDTAQQIVYRNVMLENYKNLVSLGYQLTKPDVILRLEKGEEPSADYKDDDDKAPKKKRKVPKKKRKV

SEQ ID NO: 661 - protein, 2318 aa, synthetic construct
MGTMPKKKRKVPKKKRKVYNHDQEFDPPKVYPPVPAEKRKPIRVLSLFDGIATGLLVLKDLGIQVDRYIASEVCEDSITVGMVRHQGKIMYVGDVRSVTQKHIQEWGPFDLVIGGSPCNDLSIVNPARKGLYEGTGRLFFEFYRLLHDARPKEGDDRPFFWLFENVVAMGVSDKRDISRFLESNPVMIDAKEVSAAHRARYFWGNLPGMNRPLASTVNDKLELQECLEHGRIAKFSKVRTITTRSNSIKQGKDQHFPVFMNEKEDILWCTEMERVFGFPVHYTDVSNMSRLARQRLLGRSWSVPVIRHLFAPLKEYFACVSSGNSNANSRGPSFSSGLVPLSLRGSHMAAIPALDPEAEPSMDVILVGSSELSSSVSPGTGRDLIAYEVKANQRNIEDICICCGSLQVHTQHPLFEGGICAPCKDKFLDALFLYDDDGYQSYCSICCSGETLLICGNPDCTRCYCFECVDSLVGPGTSGKVHAMSNWVCYLCLPSSRSGLLQRRRKWRSQLKAFYDRESENPLEMFETVPVWRRQPVRVLSLFEDIKKELTSLGFLESGSDPGQLKHVVDVTDTVRKDVEEWGPFDLVYGATPPLGHTCDRPPSWYLFQFHRLLQYARPKPGSPRPFFWMFVDNLVLNKEDLDVASRFLEMEPVTIPDVHGGSLQNAVRVWSNIPAIRSRHWALVSEEELSLLAQNKQSSKLAAKWPTKLVKNCFLPLREYFKYFSTELTSSLGGPSSGAPPPSGGSPAGSPTSTEEGTSESATPESGPGTSTEPSEGSAPGSPAGSPTSTEEGTSTEPSEGSAPGTSTEPSELEDKKYSIGLAIGTNSVGWAVITDEYKVPSKKFKVLGNTDRHSIKKNLIGALLFDSGETAEATRLKRTARRRYTRRKNRICYLQEIFSNEMAKVDDSFFHRLEESFLVEEDKKHERHPIFGNIVDEVAYHEKYPTIYHLRKKLVDSTDKADLRLIYLALAHMIKFRGHFLIEGDLNPDNSDVDKLFIQLVQTYNQLFEENPINASGVDAKAILSARLSKSRRLENLIAQLPGEKKNGLFGNLIALSLGLTPNFKSNFDLAEDAKLQLSKDTYDDDLDNLLAQIGDQYADLFLAAKNLSDAILLSDILRVNTEITKAPLSASMIKRYDEHHQDLTLLKALVRQQLPEKYKEIFFDQSKNGYAGYIDGGASQEEFYKFIKPILEKMDGTEELLVKLNREDLLRKQRTFDNGSIPHQIHLGELHAILRRQEDFYPFLKDNREKIEKILTFRIPYYVGPLARGNSRFAWMTRKSEETITPWNFEEVVDKGASAQSFIERMTNFDKNLPNEKVLPKHSLLYEYFTVYNELTKVKYVTEGMRKPAFLSGEQKKAIVDLLFKTNRKVTVKQLKEDYFKKIECFDSVEISGVEDRFNASLGTYHDLLKIIKDKDFLDNEENEDILEDIVLTLTLFEDREMIEERLKTYAHLFDDKVMKQLKRRRYTGWGRLSRKLINGIRDKQSGKTILDFLKSDGFANRNFMQLIHDDSLTFKEDIQKAQVSGQGDSLHEHIANLAGSPAIKKGILQTVKVVDELVKVMGRHKPENIVIEMARENQTTQKGQKNSRERMKRIEEGIKELGSQILKEHPVENTQLQNEKLYLYYLQNGRDMYVDQELDINRLSDYDVDAIVPQSFLKDDSIDNKVLTRSDKNRGKSDNVPSEEVVKKMKNYWRQLLNAKLITQRKFDNLTKAERGGLSELDKAGFIKRQLVETRQITKHVAQILDSRMNTKYDENDKLIREVKVITLKSKLVSDFRKDFQFYKVREINNYHHAHDAYLNAVVGTALIKKYPKLESEFVYGDYKVYDVRKMIAKSEQEIGKATAKYFFYSNIMNFFKTEITLANGEIRKRPLIETNGETGEIVWDKGRDFATVRKVLSMPQVNIVKKTEVQTGGFSKESILPKRNSDKLIARKKDWDPKKYGGFDSPTVAYSVLVVAKVEKGKSKKLKSVKELLGITIMERSSFEKNPIDFLEAKGYKEVKKDLIIKLPKYSLFELENGRKRMLASAGELQKGNELALPSKYVNFLYLASHYEKLKGSPEDNEQKQLFVEQHKHYLDEIIEQISEFSKRVILADANLDKVLSAYNKHRDKPIREQAENIIHLFTLTNLGAPAAFKYFDTTIDRKRYTSTKEVLDATLIHQSITGLYETRIDLSQLGGDSPKKKRKVGVDGSSGSETPGTSESATPESTGNKKLEAVGTGIEPKAMSQGLVTFGDVAVDFSQEEWEWLNPIQRNLYRKVMLENYRNLASLGLCVSKPDVISSLEQGKEPWSADYKDDDDKAPKKKRKVPKKKRKV

SEQ ID NO: 662 - protein, 2318 aa, synthetic construct
MGTMPKKKRKVPKKKRKVYNHDQEFDPPKVYPPVPAEKRKPIRVLSLFDGIATGLLVLKDLGIQVDRYIASEVCEDSITVGMVRHQGKIMYVGDVRSVTQKHIQEWGPFDLVIGGSPCNDLSIVNPARKGLYEGTGRLFFEFYRLLHDARPKEGDDRPFFWLFENVVAMGVSDKRDISRFLESNPVMIDAKEVSAAHRARYFWGNLPGMNRPLASTVNDKLELQECLEHGRIAKFSKVRTITTRSNSIKQGKDQHFPVFMNEKEDILWCTEMERVFGFPVHYTDVSNMSRLARQRLLGRSWSVPVIRHLFAPLKEYFACVSSGNSNANSRGPSFSSGLVPLSLRGSHMAAIPALDPEAEPSMDVILVGSSELSSSVSPGTGRDLIAYEVKANQRNIEDICICCGSLQVHTQHPLFEGGICAPCKDKFLDALFLYDDDGYQSYCSICCSGETLLICGNPDCTRCYCFECVDSLVGPGTSGKVHAMSNWVCYLCLPSSRSGLLQRRRKWRSQLKAFYDRESENPLEMFETVPVWRRQPVRVLSLFEDIKKELTSLGFLESGSDPGQLKHVVDVTDTVRKDVEEWGPFDLVYGATPPLGHTCDRPPSWYLFQFHRLLQYARPKPGSPRPFFWMFVDNLVLNKEDLDVASRFLEMEPVTIPDVHGGSLQNAVRVWSNIPAIRSRHWALVSEEELSLLAQNKQSSKLAAKWPTKLVKNCFLPLREYFKYFSTELTSSLGGPSSGAPPPSGGSPAGSPTSTEEGTSESATPESGPGTSTEPSEGSAPGSPAGSPTSTEEGTSTEPSEGSAPGTSTEPSELEDKKYSIGLAIGTNSVGWAVITDEYKVPSKKFKVLGNTDRHSIKKNLIGALLFDSGETAEATRLKRTARRRYTRRKNRICYLQEIFSNEMAKVDDSFFHRLEESFLVEEDKKHERHPIFGNIVDEVAYHEKYPTIYHLRKKLVDSTDKADLRLIYLALAHMIKFRGHFLIEGDLNPDNSDVDKLFIQLVQTYNQLFEENPINASGVDAKAILSARLSKSRRLENLIAQLPGEKKNGLFGNLIALSLGLTPNFKSNFDLAEDAKLQLSKDTYDDDLDNLLAQIGDQYADLFLAAKNLSDAILLSDILRVNTEITKAPLSASMIKRYDEHHQDLTLLKALVRQQLPEKYKEIFFDQSKNGYAGYIDGGASQEEFYKFIKPILEKMDGTEELLVKLNREDLLRKQRTFDNGSIPHQIHLGELHAILRRQEDFYPFLKDNREKIEKILTFRIPYYVGPLARGNSRFAWMTRKSEETITPWNFEEVVDKGASAQSFIERMTNFDKNLPNEKVLPKHSLLYEYFTVYNELTKVKYVTEGMRKPAFLSGEQKKAIVDLLFKTNRKVTVKQLKEDYFKKIECFDSVEISGVEDRFNASLGTYHDLLKIIKDKDFLDNEENEDILEDIVLTLTLFEDREMIEERLKTYAHLFDDKVMKQLKRRRYTGWGRLSRKLINGIRDKQSGKTILDFLKSDGFANRNFMQLIHDDSLTFKEDIQKAQVSGQGDSLHEHIANLAGSPAIKKGILQTVKVVDELVKVMGRHKPENIVIEMARENQTTQKGQKNSRERMKRIEEGIKELGSQILKEHPVENTQLQNEKLYLYYLQNGRDMYVDQELDINRLSDYDVDAIVPQSFLKDDSIDNKVLTRSDKNRGKSDNVPSEEVVKKMKNYWRQLLNAKLITQRKFDNLTKAERGGLSELDKAGFIKRQLVETRQITKHVAQILDSRMNTKYDENDKLIREVKVITLKSKLVSDFRKDFQFYKVREINNYHHAHDAYLNAVVGTALIKKYPKLESEFVYGDYKVYDVRKMIAKSEQEIGKATAKYFFYSNIMNFFKTEITLANGEIRKRPLIETNGETGEIVWDKGRDFATVRKVLSMPQVNIVKKTEVQTGGFSKESILPKRNSDKLIARKKDWDPKKYGGFDSPTVAYSVLVVAKVEKGKSKKLKSVKELLGITIMERSSFEKNPIDFLEAKGYKEVKKDLIIKLPKYSLFELENGRKRMLASAGELQKGNELALPSKYVNFLYLASHYEKLKGSPEDNEQKQLFVEQHKHYLDEIIEQISEFSKRVILADANLDKVLSAYNKHRDKPIREQAENIIHLFTLTNLGAPAAFKYFDTTIDRKRYTSTKEVLDATLIHQSITGLYETRIDLSQLGGDSPKKKRKVGVDGSSGSETPGTSESATPESTGDSVAFEDVAVNFTLEEWALLDPSQKNLYRDVMRETFRNLASVGKQWEDQNIEDPFKIPRRNISHIPERLCESKEGGQGEESADYKDDDDKAPKKKRKVPKKKRKV

SEQ ID NO: 663 - protein, 2338 aa, synthetic construct
MGTMPKKKRKVPKKKRKVYNHDQEFDPPKVYPPVPAEKRKPIRVLSLFDGIATGLLVLKDLGIQVDRYIASEVCEDSITVGMVRHQGKIMYVGDVRSVTQKHIQEWGPFDLVIGGSPCNDLSIVNPARKGLYEGTGRLFFEFYRLLHDARPKEGDDRPFFWLFENVVAMGVSDKRDISRFLESNPVMIDAKEVSAAHRARYFWGNLPGMNRPLASTVNDKLELQECLEHGRIAKFSKVRTITTRSNSIKQGKDQHFPVFMNEKEDILWCTEMERVFGFPVHYTDVSNMSRLARQRLLGRSWSVPVIRHLFAPLKEYFACVSSGNSNANSRGPSFSSGLVPLSLRGSHMAAIPALDPEAEPSMDVILVGSSELSSSVSPGTGRDLIAYEVKANQRNIEDICICCGSLQVHTQHPLFEGGICAPCKDKFLDALFLYDDDGYQSYCSICCSGETLLICGNPDCTRCYCFECVDSLVGPGTSGKVHAMSNWVCYLCLPSSRSGLLQRRRKWRSQLKAFYDRESENPLEMFETVPVWRRQPVRVLSLFEDIKKELTSLGFLESGSDPGQLKHVVDVTDTVRKDVEEWGPFDLVYGATPPLGHTCDRPPSWYLFQFHRLLQYARPKPGSPRPFFWMFVDNLVLNKEDLDVASRFLEMEPVTIPDVHGGSLQNAVRVWSNIPAIRSRHWALVSEEELSLLAQNKQSSKLAAKWPTKLVKNCFLPLREYFKYFSTELTSSLGGPSSGAPPPSGGSPAGSPTSTEEGTSESATPESGPGTSTEPSEGSAPGSPAGSPTSTEEGTSTEPSEGSAPGTSTEPSELEDKKYSIGLAIGTNSVGWAVITDEYKVPSKKFKVLGNTDRHSIKKNLIGALLFDSGETAEATRLKRTARRRYTRRKNRICYLQEIFSNEMAKVDDSFFHRLEESFLVEEDKKHERHPIFGNIVDEVAYHEKYPTIYHLRKKLVDSTDKADLRLIYLALAHMIKFRGHFLIEGDLNPDNSDVDKLFIQLVQTYNQLFEENPINASGVDAKAILSARLSKSRRLENLIAQLPGEKKNGLFGNLIALSLGLTPNFKSNFDLAEDAKLQLSKDTYDDDLDNLLAQIGDQYADLFLAAKNLSDAILLSDILRVNTEITKAPLSASMIKRYDEHHQDLTLLKALVRQQLPEKYKEIFFDQSKNGYAGYIDGGASQEEFYKFIKPILEKMDGTEELLVKLNREDLLRKQRTFDNGSIPHQIHLGELHAILRRQEDFYPFLKDNREKIEKILTFRIPYYVGPLARGNSRFAWMTRKSEETITPWNFEEVVDKGASAQSFIERMTNFDKNLPNEKVLPKHSLLYEYFTVYNELTKVKYVTEGMRKPAFLSGEQKKAIVDLLFKTNRKVTVKQLKEDYFKKIECFDSVEISGVEDRFNASLGTYHDLLKIIKDKDFLDNEENEDILEDIVLTLTLFEDREMIEERLKTYAHLFDDKVMKQLKRRRYTGWGRLSRKLINGIRDKQSGKTILDFLKSDGFANRNFMQLIHDDSLTFKEDIQKAQVSGQGDSLHEHIANLAGSPAIKKGILQTVKVVDELVKVMGRHKPENIVIEMARENQTTQKGQKNSRERMKRIEEGIKELGSQILKEHPVENTQLQNEKLYLYYLQNGRDMYVDQELDINRLSDYDVDAIVPQSFLKDDSIDNKVLTRSDKNRGKSDNVPSEEVVKKMKNYWRQLLNAKLITQRKFDNLTKAERGGLSELDKAGFIKRQLVETRQITKHVAQILDSRMNTKYDENDKLIREVKVITLKSKLVSDFRKDFQFYKVREINNYHHAHDAYLNAVVGTALIKKYPKLESEFVYGDYKVYDVRKMIAKSEQEIGKATAKYFFYSNIMNFFKTEITLANGEIRKRPLIETNGETGEIVWDKGRDFATVRKVLSMPQVNIVKKTEVQTGGFSKESILPKRNSDKLIARKKDWDPKKYGGFDSPTVAYSVLVVAKVEKGKSKKLKSVKELLGITIMERSSFEKNPIDFLEAKGYKEVKKDLIIKLPKYSLFELENGRKRMLASAGELQKGNELALPSKYVNFLYLASHYEKLKGSPEDNEQKQLFVEQHKHYLDEIIEQISEFSKRVILADANLDKVLSAYNKHRDKPIREQAENIIHLFTLTNLGAPAAFKYFDTTIDRKRYTSTKEVLDATLIHQSITGLYETRIDLSQLGGDSPKKKRKVGVDGSSGSETPGTSESATPESTGMNNSQGRVTFEDVTVNFTQGEWQRLNPEQRNLYRDVMLENYSNLVSVGQGETTKPDVILRLEQGKEPWLEEEEVLGSGRAEKNGDIGGQIWKPKDVKESLSADYKDDDDKAPKKKRKVPKKKRKV

SEQ ID NO: 664 - protein, 5 aa, synthetic construct
GGGGS

SEQ ID NO: 665 - protein, 5 aa, synthetic construct
EAAAK

SEQ ID NO: 666 - protein, 4 aa, synthetic construct
SGGS

SEQ ID NO: 667 - protein, 2335 aa, synthetic construct
MPKKKRKVPKKKRKVYNHDQEFDPPKVYPPVPAEKRKPIRVLSLFDGIATGLLVLKDLGIQVDRYIASEVCEDSITVGMVRHQGKIMYVGDVRSVTQKHIQEWGPFDLVIGGSPCNDLSIVNPARKGLYEGTGRLFFEFYRLLHDARPKEGDDRPFFWLFENVVAMGVSDKRDISRFLESNPVMIDAKEVSAAHRARYFWGNLPGMNRPLASTVNDKLELQECLEHGRIAKFSKVRTITTRSNSIKQGKDQHFPVFMNEKEDILWCTEMERVFGFPVHYTDVSNMSRLARQRLLGRSWSVPVIRHLFAPLKEYFACVSSGNSNANSRGPSFSSGLVPLSLRGSHMAAIPALDPEAEPSMDVILVGSSELSSSVSPGTGRDLIAYEVKANQRNIEDICICCGSLQVHTQHPLFEGGICAPCKDKFLDALFLYDDDGYQSYCSICCSGETLLICGNPDCTRCYCFECVDSLVGPGTSGKVHAMSNWVCYLCLPSSRSGLLQRRRKWRSQLKAFYDRESENPLEMFETVPVWRRQPVRVLSLFEDIKKELTSLGFLESGSDPGQLKHVVDVTDTVRKDVEEWGPFDLVYGATPPLGHTCDRPPSWYLFQFHRLLQYARPKPGSPRPFFWMFVDNLVLNKEDLDVASRFLEMEPVTIPDVHGGSLQNAVRVWSNIPAIRSRHWALVSEEELSLLAQNKQSSKLAAKWPTKLVKNCFLPLREYFKYFSTELTSSLGGPSSGAPPPSGGSPAGSPTSTEEGTSESATPESGPGTSTEPSEGSAPGSPAGSPTSTEEGTSTEPSEGSAPGTSTEPSELEDKKYSIGLAIGTNSVGWAVITDEYKVPSKKFKVLGNTDRHSIKKNLIGALLFDSGETAEATRLKRTARRRYTRRKNRICYLQEIFSNEMAKVDDSFFHRLEESFLVEEDKKHERHPIFGNIVDEVAYHEKYPTIYHLRKKLVDSTDKADLRLIYLALAHMIKFRGHFLIEGDLNPDNSDVDKLFIQLVQTYNQLFEENPINASGVDAKAILSARLSKSRRLENLIAQLPGEKKNGLFGNLIALSLGLTPNFKSNFDLAEDAKLQLSKDTYDDDLDNLLAQIGDQYADLFLAAKNLSDAILLSDILRVNTEITKAPLSASMIKRYDEHHQDLTLLKALVRQQLPEKYKEIFFDQSKNGYAGYIDGGASQEEFYKFIKPILEKMDGTEELLVKLNREDLLRKQRTFDNGSIPHQIHLGELHAILRRQEDFYPFLKDNREKIEKILTFRIPYYVGPLARGNSRFAWMTRKSEETITPWNFEEVVDKGASAQSFIERMTNFDKNLPNEKVLPKHSLLYEYFTVYNELTKVKYVTEGMRKPAFLSGEQKKAIVDLLFKTNRKVTVKQLKEDYFKKIECFDSVEISGVEDRFNASLGTYHDLLKIIKDKDFLDNEENEDILEDIVLTLTLFEDREMIEERLKTYAHLFDDKVMKQLKRRRYTGWGRLSRKLINGIRDKQSGKTILDFLKSDGFANRNFMQLIHDDSLTFKEDIQKAQVSGQGDSLHEHIANLAGSPAIKKGILQTVKVVDELVKVMGRHKPENIVIEMARENQTTQKGQKNSRERMKRIEEGIKELGSQILKEHPVENTQLQNEKLYLYYLQNGRDMYVDQELDINRLSDYDVDAIVPQSFLKDDSIDNKVLTRSDKNRGKSDNVPSEEVVKKMKNYWRQLLNAKLITQRKFDNLTKAERGGLSELDKAGFIKRQLVETRQITKHVAQILDSRMNTKYDENDKLIREVKVITLKSKLVSDFRKDFQFYKVREINNYHHAHDAYLNAVVGTALIKKYPKLESEFVYGDYKVYDVRKMIAKSEQEIGKATAKYFFYSNIMNFFKTEITLANGEIRKRPLIETNGETGEIVWDKGRDFATVRKVLSMPQVNIVKKTEVQTGGFSKESILPKRNSDKLIARKKDWDPKKYGGFDSPTVAYSVLVVAKVEKGKSKKLKSVKELLGITIMERSSFEKNPIDFLEAKGYKEVKKDLIIKLPKYSLFELENGRKRMLASAGELQKGNELALPSKYVNFLYLASHYEKLKGSPEDNEQKQLFVEQHKHYLDEIIEQISEFSKRVILADANLDKVLSAYNKHRDKPIREQAENIIHLFTLTNLGAPAAFKYFDTTIDRKRYTSTKEVLDATLIHQSITGLYETRIDLSQLGGDSPKKKRKVGVDGSSGSETPGTSESATPESTGMNNSQGRVTFEDVTVNFTQGEWQRLNPEQRNLYRDVMLENYSNLVSVGQGETTKPDVILRLEQGKEPWLEEEEVLGSGRAEKNGDIGGQIWKPKDVKESLSADYKDDDDKAPKKKRKVPKKKRKV

SEQ ID NO: 668 - DNA, 7005 bp, synthetic construct
  source 1..7005: mol_type = other DNA
atgccaaaaaagaagagaaaggtaccgaagaaaaaaagaaaggtatacaatcacgatcaggagttcgacccccctaaggtgtacccaccagtgcctgcagagaagaggaagccaatccgggtgctgagcctgtttgatggcatcgccaccggcctgctggtgctgaaggatctgggcatccaggtggaccggtacatcgcctccgaggtgtgcgaggattctatcaccgtgggcatggtgcgccaccagggcaagatcatgtatgtgggcgacgtgcggtccgtgacacagaagcacatccaggagtggggcccattcgatctggtgatcggcggcagcccctgtaatgacctgtccatcgtgaaccctgcaaggaagggactgtacgagggaaccggccggctgttctttgagttttatagactgctgcacgacgccaggcctaaggagggcgacgatagaccattcttttggctgttcgagaatgtggtggctatgggcgtgagcgataagagggacatctccaggtttctggagtctaaccccgtgatgatcgatgcaaaggaggtgtccgccgcacacagagccaggtatttctggggcaatctgccaggaatgaacaggccactggcaagcaccgtgaatgacaagctggagctgcaggagtgcctggagcacggaaggatcgccaagttttccaaggtgcgcacaatcaccacacggagcaattccatcaagcagggcaaggatcagcacttccccgtgttcatgaacgagaaggaggacatcctgtggtgtaccgagatggagagagtgttcggctttccagtgcactacacagacgtgtctaacatgagcaggctggcaaggcagcggctgctgggcagatcttggagcgtgcccgtgatcaggcacctgttcgcccctctgaaggagtattttgcctgcgtgagcagcggcaactccaatgccaacagccggggcccctctttcagctccggattggtgcctctgagcctgaggggctcccacatggcagcaatccccgccctggaccccgaggccgagcctagcatggacgtgatcctggtgggctctagcgagctgtcctctagcgtgtctccaggaaccggaagggatctgatcgcatacgaggtgaaggccaatcagcggaacatcgaggacatctgtatctgctgtggcagcctgcaggtgcacacacagcacccactgttcgagggaggaatctgcgcaccctgtaaggataagttcctggacgccctgtttctgtacgacgatgacggctaccagtcctattgctctatctgctgttccggcgagaccctgctgatctgcggcaatccagattgtacaaggtgctattgttttgagtgcgtggactctctggtgggaccaggcaccagcggaaaggtgcacgccatgtccaactgggtgtgctacctgtgcctgccatcctctcgcagcggactgctgcagcggagaaggaagtggagatcccagctgaaggccttctatgatagggagtctgagaaccccctggagatgtttgagaccgtgccagtgtggcgccggcagcccgtgagggtgctgagcctgttcgaggatatcaagaaggagctgacatccctgggctttctggagtccggctctgaccccggacagctgaagcacgtggtggatgtgaccgacacagtgcggaaggatgtggaggagtggggccctttcgacctggtgtacggagcaacccctccactgggacacacatgcgacagacccccttcttggtacctgttccagtttcaccgcctgctgcagtatgcaaggccaaagccaggcagccctagaccattcttttggatgttcgtggataatctggtgctgaacaaggaggatctggacgtggccagcaggtttctggagatggagccagtgaccatcccagacgtgcacggcggctccctgcagaatgccgtgcgcgtgtggtctaacatccctgccatcagaagcaggcactgggcactggtgagcgaggaggagctgtccctgctggcccagaataagcagagcagcaagctggccgccaagtggcctacaaagctggtgaagaactgcttcctgccactgcgggagtacttcaagtatttttccaccgagctgacatctagcctgggaggaccctcctctggcgccccaccacctagcggcggctcccctgccggctctccaaccagcacagaggagggcaccagcgagtccgccacaccagagtctggacctggcaccagcacagagccatccgagggctctgccccaggctctcctgcaggcagccctacctccaccgaagagggcaccagcacagagccttctgagggcagcgccccaggcacctctacagagccaagcgagctcgaggacaagaagtacagcatcggcctggccatcggcaccaactctgtgggctgggccgtgatcaccgacgagtacaaggtgcccagcaagaaattcaaggtgctgggcaacaccgaccggcacagcatcaagaagaacctgatcggagccctgctgttcgacagcggcgaaacagccgaggccacccggctgaagagaaccgccagaagaagatacaccagacggaagaaccggatctgctatctgcaagagatcttcagcaacgagatggccaaggtggacgacagcttcttccacagactggaagagtccttcctggtggaagaggataagaagcacgagcggcaccccatcttcggcaacatcgtggacgaggtggcctaccacgagaagtaccccaccatctaccacctgagaaagaaactggtggacagcaccgacaaggccgacctgcggctgatctatctggccctggcccacatgatcaagttccggggccacttcctgatcgagggcgacctgaaccccgacaacagcgacgtggacaagctgttcatccagctggtgcagacctacaaccagctgttcgaggaaaaccccatcaacgccagcggcgtggacgccaaggccatcctgtctgccagactgagcaagagcagacggctggaaaatctgatcgcccagctgcccggcgagaagaagaatggcctgttcggcaacctgattgccctgagcctgggcctgacccccaacttcaagagcaacttcgacctggccgaggatgccaaactgcagctgagcaaggacacctacgacgacgacctggacaacctgctggcccagatcggcgaccagtacgccgacctgtttctggccgccaagaacctgtccgacgccatcctgctgagcgacatcctgagagtgaacaccgagatcaccaaggcccccctgagcgcctctatgatcaagagatacgacgagcaccaccaggacctgaccctgctgaaagctctcgtgcggcagcagctgcctgagaagtacaaagagattttcttcgaccagagcaagaacggctacgccggctacattgacggcggagccagccaggaagagttctacaagttcatcaagcccatcctggaaaagatggacggcaccgaggaactgctcgtgaagctgaacagagaggacctgctgcggaagcagcggaccttcgacaacggcagcatcccccaccagatccacctgggagagctgcacgccattctgcggcggcaggaagatttttacccattcctgaaggacaaccgggaaaagatcgagaagatcctgaccttccgcatcccctactacgtgggccctctggccaggggaaacagcagattcgcctggatgaccagaaagagcgaggaaaccatcaccccctggaacttcgaggaagtggtggacaagggcgcttccgcccagagcttcatcgagcggatgaccaacttcgataagaacctgcccaacgagaaggtgctgcccaagcacagcctgctgtacgagtacttcaccgtgtataacgagctgaccaaagtgaaatacgtgaccgagggaatgagaaagcccgccttcctgagcggcgagcagaaaaaggccatcgtggacctgctgttcaagaccaaccggaaagtgaccgtgaagcagctgaaagaggactacttcaagaaaatcgagtgcttcgactccgtggaaatctccggcgtggaagatcggttcaacgcctccctgggcacataccacgatctgctgaaaattatcaaggacaaggacttcctggacaatgaggaaaacgaggacattctggaagatatcgtgctgaccctgacactgtttgaggacagagagatgatcgaggaacggctgaaaacctatgcccacctgttcgacgacaaagtgatgaagcagctgaagcggcggagatacaccggctggggcaggctgagccggaagctgatcaacggcatccgggacaagcagtccggcaagacaatcctggatttcctgaagtccgacggcttcgccaacagaaacttcatgcagctgatccacgacgacagcctgacctttaaagaggacatccagaaagcccaggtgtccggccagggcgatagcctgcacgagcacattgccaatctggccggcagccccgccattaagaagggcatcctgcagacagtgaaggtggtggacgagctcgtgaaagtgatgggccggcacaagcccgagaacatcgtgatcgaaatggccagagagaaccagaccacccagaagggacagaagaacagccgcgagagaatgaagcggatcgaagagggcatcaaagagctgggcagccagatcctgaaagaacaccccgtggaaaacacccagctgcagaacgagaagctgtacctgtactacctgcagaatgggcgggatatgtacgtggaccaggaactggacatcaaccggctgtccgactacgatgtggacgccatcgtgcctcagagctttctgaaggacgactccatcgacaacaaggtgctgaccagaagcgacaagaaccggggcaagagcgacaacgtgccctccgaagaggtcgtgaagaagatgaagaactactggcggcagctgctgaacgccaagctgattacccagagaaagttcgacaatctgaccaaggccgagagaggcggcctgagcgaactggataaggccggcttcatcaagagacagctggtggaaacccggcagatcacaaagcacgtggcacagatcctggactcccggatgaacactaagtacgacgagaatgacaagctgatccgggaagtgaaagtgatcaccctgaagtccaagctggtgtccgatttccggaaggatttccagttttacaaagtgcgcgagatcaacaactaccaccacgcccacgacgcctacctgaacgccgtcgtgggaaccgccctgatcaaaaagtaccctaagctggaaagcgagttcgtgtacggcgactacaaggtgtacgacgtgcggaagatgatcgccaagagcgagcaggaaatcggcaaggctaccgccaagtacttcttctacagcaacatcatgaactttttcaagaccgagattaccctggccaacggcgagatccggaagcggcctctgatcgagacaaacggcgaaaccggggagatcgtgtgggataagggccgggattttgccaccgtgcggaaagtgctgagcatgccccaagtgaatatcgtgaaaaagaccgaggtgcagacaggcggcttcagcaaagagtctatcctgcccaagaggaacagcgataagctgatcgccagaaagaaggactgggaccctaagaagtacggcggcttcgacagccccaccgtggcctattctgtgctggtggtggccaaagtggaaaagggcaagtccaagaaactgaagagtgtgaaagagctgctggggatcaccatcatggaaagaagcagcttcgagaagaatcccatcgactttctggaagccaagggctacaaagaagtgaaaaaggacctgatcatcaagctgcctaagtactccctgttcgagctggaaaacggccggaagagaatgctggcctctgccggcgaactgcagaagggaaacgaactggccctgccctccaaatatgtgaacttcctgtacctggccagccactatgagaagctgaagggctcccccgaggataatgagcagaaacagctgtttgtggaacagcacaagcactacctggacgagatcatcgagcagatcagcgagttctccaagagagtgatcctggccgacgctaatctggacaaagtgctgtccgcctacaacaagcaccgggataagcccatcagagagcaggccgagaatatcatccacctgtttaccctgaccaatctgggagcccctgccgccttcaagtactttgacaccaccatcgaccggaagaggtacaccagcaccaaagaggtgctggacgccaccctgatccaccagagcatcaccggcctgtacgagacacggatcgacctgtctcagctgggaggcgacagccccaagaagaagagaaaggtgggagtcgacggatccagcggctccgagaccccaggcacatctgagagcgccacccctgagtccaccggtatgaacaattcacaggggagagtgacattcgaagacgtgaccgtgaacttcacccagggagaatggcagcgcttgaacccagaacaaaggaacctctatcgggacgtgatgctggaaaactactcaaatttggtgagcgttgggcagggtgagaccactaagcctgacgtgatcctgagattggaacagggcaaggagccttggctcgaggaagaggaagtcctgggctcagggagggccgagaaaaacggtgatataggaggccagatatggaagcctaaggacgtcaaggagagcctgagcgctgattacaaagatgatgacgataaagcccccaagaagaaaaggaaggtcccaaagaaaaaaagaaaggtg

SEQ ID NO: 669-699 - skipped (31 entries)

SEQ ID NO: 700 - DNA, 18 bp, synthetic construct
  source 1..18: mol_type = other DNA
gcatctctggggccagtc

SEQ ID NO: 701 - DNA, 19 bp, synthetic construct
  source 1..19: mol_type = other DNA
ctggggccagtctgcaaag

SEQ ID NO: 702 - DNA, 19 bp, synthetic construct
  source 1..19: mol_type = other DNA
gcaaagcgagggggcagcc

SEQ ID NO: 703 - DNA, 18 bp, synthetic construct
  source 1..18: mol_type = other DNA
tcggagggcgccgatgta

SEQ ID NO: 704 - DNA, 19 bp, synthetic construct
  source 1..19: mol_type = other DNA
gatgtttaagaaggcatgc

SEQ ID NO: 705 - DNA, 19 bp, synthetic construct
  source 1..19: mol_type = other DNA
gtctcgtgatgtttaagaa

SEQ ID NO: 706 - DNA, 19 bp, synthetic construct
  source 1..19: mol_type = other DNA
ggaaactgaaaacgggaaa

SEQ ID NO: 707 - DNA, 19 bp, synthetic construct
  source 1..19: mol_type = other DNA
ggttagagagagggacttt

SEQ ID NO: 708 - DNA, 19 bp, synthetic construct
  source 1..19: mol_type = other DNA
gtggaggcgtcgcgctggc

SEQ ID NO: 709 - DNA, 20 bp, synthetic construct
  source 1..20: mol_type = other DNA
taggagagactcacgctgga

SEQ ID NO: 710 - DNA, 20 bp, synthetic construct
  source 1..20: mol_type = other DNA
gaggaaggaccagagcggga

SEQ ID NO: 711 - DNA, 19 bp, synthetic construct
  source 1..19: mol_type = other DNA
gcgggagaggaaggaccag

SEQ ID NO: 712 - DNA, 19 bp, synthetic construct
  source 1..19: mol_type = other DNA
gtcacggagcgagagagca

SEQ ID NO: 713 - DNA, 19 bp, synthetic construct
  source 1..19: mol_type = other DNA
ttggagaagggaagtcacg

SEQ ID NO: 714 - DNA, 19 bp, synthetic construct
  source 1..19: mol_type = other DNA
ggggaagcggcggggtggc

SEQ ID NO: 715 - DNA, 18 bp, synthetic construct
  source 1..18: mol_type = other DNA
gggtgcgcacccgggacg

SEQ ID NO: 716 - DNA, 20 bp, synthetic construct
  source 1..20: mol_type = other DNA
gccgaaaggggcaagtagcg

SEQ ID NO: 717 - DNA, 18 bp, synthetic construct
  source 1..18: mol_type = other DNA
gtcgccgtaggccaaagg

SEQ ID NO: 718 - DNA, 18 bp, synthetic construct
  source 1..18: mol_type = other DNA
ggcgacgggagggtcggg

SEQ ID NO: 719 - DNA, 19 bp, synthetic construct
  source 1..19: mol_type = other DNA
ggcgacgggagggtcggga

SEQ ID NO: 720 - DNA, 19 bp, synthetic construct
  source 1..19: mol_type = other DNA
tcagagcgccgaggttggg

SEQ ID NO: 721 - DNA, 18 bp, synthetic construct
  source 1..18: mol_type = other DNA
agcgccgaggttggggga

SEQ ID NO: 722 - DNA, 19 bp, synthetic construct
  source 1..19: mol_type = other DNA
agcgccgaggttgggggag

SEQ ID NO: 723 - DNA, 19 bp, synthetic construct
  source 1..19: mol_type = other DNA
gctgggggagccagaggcc

SEQ ID NO: 724 - DNA, 19 bp, synthetic construct
  source 1..19: mol_type = other DNA
gcagctggagtgggggacg

SEQ ID NO: 725 - DNA, 18 bp, synthetic construct
  source 1..18: mol_type = other DNA
gctggagtgggggacggg

SEQ ID NO: 726 - DNA, 19 bp, synthetic construct
  source 1..19: mol_type = other DNA
ggagtgggggacgggtagg

SEQ ID NO: 727 - DNA, 18 bp, synthetic construct
  source 1..18: mol_type = other DNA
gagtgggggacgggtagg

SEQ ID NO: 728 - DNA, 19 bp, synthetic construct
  source 1..19: mol_type = other DNA
gagtgggggacgggtaggc

SEQ ID NO: 729 - DNA, 18 bp, synthetic construct
  source 1..18: mol_type = other DNA
gtgggggacgggtaggct

SEQ ID NO: 730 - DNA, 19 bp, synthetic construct
  source 1..19: mol_type = other DNA
gaggtttgtgaacgcgtgg

SEQ ID NO: 731 - DNA, 19 bp, synthetic construct
  source 1..19: mol_type = other DNA
tgtgaacgcgtggaggggc

SEQ ID NO: 732 - DNA, 18 bp, synthetic construct
  source 1..18: mol_type = other DNA
gtgaacgcgtggaggggc

SEQ ID NO: 733 - DNA, 19 bp, synthetic construct
  source 1..19: mol_type = other DNA
gtgaacgcgtggaggggcg

SEQ ID NO: 734 - DNA, 19 bp, synthetic construct
  source 1..19: mol_type = other DNA
gtcgcccgggtaagcctgt

SEQ ID NO: 735 - DNA, 20 bp, synthetic construct
  source 1..20: mol_type = other DNA
taagcctgtctgctgcggct

SEQ ID NO: 736 - DNA, 19 bp, synthetic construct
  source 1..19: mol_type = other DNA
gaacttagcgggcgcctag

SEQ ID NO: 737 - DNA, 20 bp, synthetic construct
  source 1..20: mol_type = other DNA
gaggtgctaggacatgcgaa

SEQ ID NO: 738 - DNA, 19 bp, synthetic construct
  source 1..19: mol_type = other DNA
agtgacatgtgatgggaac

SEQ ID NO: 739 - DNA, 18 bp, synthetic construct
  source 1..18: mol_type = other DNA
gattgaagtcaagcctaa

SEQ ID NO: 740 - DNA, 19 bp, synthetic construct
  source 1..19: mol_type = other DNA
agtcaagcctaaccagggc

SEQ ID NO: 741 - DNA, 20 bp, synthetic construct
  source 1..20: mol_type = other DNA
ggcgcgcaccccagatcgga

SEQ ID NO: 742 - DNA, 20 bp, synthetic construct
  source 1..20: mol_type = other DNA
gagtctcgtgatgtttaaga

SEQ ID NO: 743 - DNA, 20 bp, synthetic construct
  source 1..20: mol_type = other DNA
gaaagtccctctctctaacc

SEQ ID NO: 744 - DNA, 20 bp, synthetic construct
  source 1..20: mol_type = other DNA
gtgcccagccaatcaggaca

SEQ ID NO: 745 - DNA, 20 bp, synthetic construct
  source 1..20: mol_type = other DNA
gcccgaatgctgtcagcttc

SEQ ID NO: 746 - DNA, 20 bp, synthetic construct
  source 1..20: mol_type = other DNA
cgcgagcacagctaaggcca

SEQ ID NO: 747 - DNA, 20 bp, synthetic construct
  source 1..20: mol_type = other DNA
actctctctttctggcctgg

SEQ ID NO: 748 - DNA, 20 bp, synthetic construct
  source 1..20: mol_type = other DNA
gaggaaggaccagagcggga

SEQ ID NO: 749 - DNA, 20 bp, synthetic construct
  source 1..20: mol_type = other DNA
gggccttgtcctgattggct

SEQ ID NO: 750 - DNA, 20 bp, synthetic construct
  source 1..20: mol_type = other DNA
cacgcgtttaatataagtgg

SEQ ID NO: 751 - DNA, 20 bp, synthetic construct
  source 1..20: mol_type = other DNA
aagtggaggcgtcgcgctgg

SEQ ID NO: 752 - DNA, 20 bp, synthetic construct
  source 1..20: mol_type = other DNA
ttcctgaagctgacagcatt

SEQ ID NO: 753 - DNA, 20 bp, synthetic construct
  source 1..20: mol_type = other DNA
tcctgaagctgacagcattc

SEQ ID NO: 754 - DNA, 20 bp, synthetic construct
  source 1..20: mol_type = other DNA
ggccacggagcgagacatct

SEQ ID NO: 755 - DNA, 20 bp, synthetic construct
  source 1..20: mol_type = other DNA
gagtagcgcgagcacagcta

SEQ ID NO: 756 - DNA, 20 bp, synthetic construct
  source 1..20: mol_type = other DNA
actcacgctggatagcctcc

SEQ ID NO: 757 - DNA, 20 bp, synthetic construct
  source 1..20: mol_type = other DNA
gggtgcagagcgggagagga

SEQ ID NO: 758 - DNA, 20 bp, synthetic construct
  source 1..20: mol_type = other DNA
gcacccccttccccactccc

SEQ ID NO: 759 - DNA, 20 bp, synthetic construct
  source 1..20: mol_type = other DNA
gctacttgcccctttcggcg

SEQ ID NO: 760 - DNA, 20 bp, synthetic construct
  source 1..20: mol_type = other DNA
tgccagcccctgttctaggg

SEQ ID NO: 761 - DNA, 20 bp, synthetic construct
  source 1..20: mol_type = other DNA
ttccaccctagaacaggggc

SEQ ID NO: 762 - DNA, 20 bp, synthetic construct
  source 1..20: mol_type = other DNA
tagtttccaccctagaacag

SEQ ID NO: 763 - DNA, 20 bp, synthetic construct
  source 1..20: mol_type = other DNA
ttagtttccaccctagaaca

SEQ ID NO: 764 - DNA, 20 bp, synthetic construct
  source 1..20: mol_type = other DNA
cttagtttccaccctagaac

SEQ ID NO: 765 - DNA, 20 bp, synthetic construct
  source 1..20: mol_type = other DNA
taagagaatgatgtacctag

SEQ ID NO: 766 - DNA, 20 bp, synthetic construct
  source 1..20: mol_type = other DNA
aagagaatgatgtacctaga

SEQ ID NO: 767 - DNA, 20 bp, synthetic construct
  source 1..20: mol_type = other DNA
atgatgtacctagagggcgc

SEQ ID NO: 768 - DNA, 20 bp, synthetic construct
  source 1..20: mol_type = other DNA
tagagcttccagcgccctct

SEQ ID NO: 769 - DNA, 20 bp, synthetic construct
  source 1..20: mol_type = other DNA
agtaaaagcagtaactgcta

SEQ ID NO: 770 - DNA, 20 bp, synthetic construct
  source 1..20: mol_type = other DNA
tagtaaaagcagtaactgct

SEQ ID NO: 771 - DNA, 20 bp, synthetic construct
  source 1..20: mol_type = other DNA
tgatttgtcggggggcgggg

SEQ ID NO: 772 - DNA, 20 bp, synthetic construct
  source 1..20: mol_type = other DNA
ttgatttgtcggggggcggg

SEQ ID NO: 773 - DNA, 20 bp, synthetic construct
  source 1..20: mol_type = other DNA
gttgatttgtcggggggcgg

SEQ ID NO: 774 - DNA, 20 bp, synthetic construct
  source 1..20: mol_type = other DNA
tgttgatttgtcggggggcg

SEQ ID NO: 775 - DNA, 20 bp, synthetic construct
  source 1..20: mol_type = other DNA
ctgttgatttgtcggggggc

SEQ ID NO: 776 - DNA, 20 bp, synthetic construct
  source 1..20: mol_type = other DNA
tctgttgatttgtcgggggg

SEQ ID NO: 777 - DNA, 20 bp, synthetic construct
  source 1..20: mol_type = other DNA
tgttctgttgatttgtcggg

SEQ ID NO: 778 - DNA, 20 bp, synthetic construct
  source 1..20: mol_type = other DNA
ttgttctgttgatttgtcgg

SEQ ID NO: 779 - DNA, 20 bp, synthetic construct
  source 1..20: mol_type = other DNA
tttgttctgttgatttgtcg

SEQ ID NO: 780 - DNA, 20 bp, synthetic construct
  source 1..20: mol_type = other DNA
ctttgttctgttgatttgtc

SEQ ID NO: 781 - DNA, 20 bp, synthetic construct
  source 1..20: mol_type = other DNA
tctttgttctgttgatttgt

SEQ ID NO: 782 - DNA, 20 bp, synthetic construct
  source 1..20: mol_type = other DNA
agaaaattacctaaacagca

SEQ ID NO: 783 - DNA, 20 bp, synthetic construct
  source 1..20: mol_type = other DNA
tacctaaacagcaaggacat

SEQ ID NO: 784 - DNA, 20 bp, synthetic construct
  source 1..20: mol_type = other DNA
acctaaacagcaaggacata

SEQ ID NO: 785 - DNA, 20 bp, synthetic construct
  source 1..20: mol_type = other DNA
tccctatgtccttgctgttt

SEQ ID NO: 786 - DNA, 20 bp, synthetic construct
  source 1..20: mol_type = other DNA
taaacagcaaggacataggg

SEQ ID NO: 787 - DNA, 20 bp, synthetic construct
  source 1..20: mol_type = other DNA
ggacatagggaggaacttct

SEQ ID NO: 788 - DNA, 20 bp, synthetic construct
  source 1..20: mol_type = other DNA
tcccttcaggaaaaagtgtt

SEQ ID NO: 789 - DNA, 20 bp, synthetic construct
  source 1..20: mol_type = other DNA
cttgcttcttgtatcccttc

SEQ ID NO: 790 - DNA, 20 bp, synthetic construct
  source 1..20: mol_type = other DNA
agggatacaagaagcaagaa

SEQ ID NO: 791 - DNA, 20 bp, synthetic construct
  source 1..20: mol_type = other DNA
aagaaaggtactctttcact

SEQ ID NO: 792 - DNA, 20 bp, synthetic construct
  source 1..20: mol_type = other DNA
accttctctgagctgtcctc

SEQ ID NO: 793 - DNA, 20 bp, synthetic construct
  source 1..20: mol_type = other DNA
tcctgaggacagctcagaga

SEQ ID NO: 794 - DNA, 20 bp, synthetic construct
  source 1..20: mol_type = other DNA
atagtcccaaaagcatcctg

SEQ ID NO: 795 - DNA, 20 bp, synthetic construct
  source 1..20: mol_type = other DNA
gcagggtttctccattctct

SEQ ID NO: 796 - DNA, 20 bp, synthetic construct
  source 1..20: mol_type = other DNA
tgcagggtttctccattctc

SEQ ID NO: 797 - DNA, 20 bp, synthetic construct
  source 1..20: mol_type = other DNA
agagaatggagaaaccctgc

SEQ ID NO: 798 - DNA, 20 bp, synthetic construct
  source 1..20: mol_type = other DNA
gagaatggagaaaccctgca

SEQ ID NO: 799 - DNA, 20 bp, synthetic construct
  source 1..20: mol_type = other DNA
cagcttgggaattccctgca

SEQ ID NO: 800 - DNA, 20 bp, synthetic construct
  source 1..20: mol_type = other DNA
acagcttgggaattccctgc

SEQ ID NO: 801 - DNA, 20 bp, synthetic construct
  source 1..20: mol_type = other DNA
tctgtttataactacagctt

SEQ ID NO: 802 - DNA, 20 bp, synthetic construct
  source 1..20: mol_type = other DNA
ttctgtttataactacagct

SEQ ID NO: 803 - DNA, 20 bp, synthetic construct
  source 1..20: mol_type = other DNA
acagaagttctccttctgct

SEQ ID NO: 804 - DNA, 20 bp, synthetic construct
  source 1..20: mol_type = other DNA
tttgaatgctacctagcaga

SEQ ID NO: 805 - DNA, 20 bp, synthetic construct
  source 1..20: mol_type = other DNA
attcaaagatcttaatcttc

SEQ ID NO: 806 - DNA, 20 bp, synthetic construct
  source 1..20: mol_type = other DNA
ttcaaagatcttaatcttct

SEQ ID NO: 807 - DNA, 20 bp, synthetic construct
  source 1..20: mol_type = other DNA
tgcaggtccgagcagttaac

SEQ ID NO: 808 - DNA, 20 bp, synthetic construct
  source 1..20: mol_type = other DNA
ggtccgagcagttaactggc

SEQ ID NO: 809 - DNA, 20 bp, synthetic construct
  source 1..20: mol_type = other DNA
gtccgagcagttaactggct

SEQ ID NO: 810 - DNA, 20 bp, synthetic construct
  source 1..20: mol_type = other DNA
tccgagcagttaactggctg

SEQ ID NO: 811 - DNA, 20 bp, synthetic construct
  source 1..20: mol_type = other DNA
gccccagccagttaactgct

SEQ ID NO: 812 - DNA, 20 bp, synthetic construct
  source 1..20: mol_type = other DNA
gatgctaagtgacttgctaa

SEQ ID NO: 813 - DNA, 20 bp, synthetic construct
  source 1..20: mol_type = other DNA
agcaagtcacttagcatctc

SEQ ID NO: 814 - DNA, 20 bp, synthetic construct
  source 1..20: mol_type = other DNA
gcaagtcacttagcatctct

SEQ ID NO: 815 - DNA, 20 bp, synthetic construct
  source 1..20: mol_type = other DNA
caagtcacttagcatctctg

SEQ ID NO: 816 - DNA, 20 bp, synthetic construct
  source 1..20: mol_type = other DNA
tggggccagtctgcaaagcg

SEQ ID NO: 817 - DNA, 20 bp, synthetic construct
  source 1..20: mol_type = other DNA
ggggccagtctgcaaagcga

SEQ ID NO: 818 - DNA, 20 bp, synthetic construct
  source 1..20: mol_type = other DNA
gggccagtctgcaaagcgag

SEQ ID NO: 819 - DNA, 20 bp, synthetic construct
  source 1..20: mol_type = other DNA
ggccagtctgcaaagcgagg

SEQ ID NO: 820 - DNA, 20 bp, synthetic construct
  source 1..20: mol_type = other DNA
tgccccctcgctttgcagac

SEQ ID NO: 821 - DNA, 20 bp, synthetic construct
  source 1..20: mol_type = other DNA
ttcaggctggaggcacatta

SEQ ID NO: 822 - DNA, 20 bp, synthetic construct
  source 1..20: mol_type = other DNA
attctaggacttcaggctgg

SEQ ID NO: 823 - DNA, 20 bp, synthetic construct
  source 1..20: mol_type = other DNA
ctcattctaggacttcaggc

SEQ ID NO: 824 - DNA, 20 bp, synthetic construct
  source 1..20: mol_type = other DNA
ggcgctcattctaggacttc

SEQ ID NO: 825 - DNA, 20 bp, synthetic construct
  source 1..20: mol_type = other DNA
gaagtcctagaatgagcgcc

SEQ ID NO: 826 - DNA, 20 bp, synthetic construct
  source 1..20: mol_type = other DNA
ggacaccgggcgctcattct

SEQ ID NO: 827 - DNA, 20 bp, synthetic construct
  source 1..20: mol_type = other DNA
gagcgcccggtgtcccaagc

SEQ ID NO: 828 - DNA, 20 bp, synthetic construct
  source 1..20: mol_type = other DNA
agcgcccggtgtcccaagct

SEQ ID NO: 829 - DNA, 20 bp, synthetic construct
  source 1..20: mol_type = other DNA
gcgcccggtgtcccaagctg

SEQ ID NO: 830 - DNA, 20 bp, synthetic construct
  source 1..20: mol_type = other DNA
gcgccccagcttgggacacc

SEQ ID NO: 831 - DNA, 20 bp, synthetic construct
  source 1..20: mol_type = other DNA
cgcgccccagcttgggacac

SEQ ID NO: 832 - DNA, 20 bp, synthetic construct
  source 1..20: mol_type = other DNA
tggggtgcgcgccccagctt

SEQ ID NO: 833 - DNA, 20 bp, synthetic construct
  source 1..20: mol_type = other DNA
ctggggtgcgcgccccagct

SEQ ID NO: 834 - DNA, 20 bp, synthetic construct
  source 1..20: mol_type = other DNA
ctggggcgcgcaccccagat

SEQ ID NO: 835 - DNA, 20 bp, synthetic construct
  source 1..20: mol_type = other DNA
gggcgcgcaccccagatcgg

SEQ ID NO: 836 - DNA, 20 bp, synthetic construct
  source 1..20: mol_type = other DNA
catcggcgccctccgatctg

SEQ ID NO: 837 - DNA, 20 bp, synthetic construct
  source 1..20: mol_type = other DNA
acatcggcgccctccgatct

SEQ ID NO: 838 - DNA, 20 bp, synthetic construct
  source 1..20: mol_type = other DNA
tacatcggcgccctccgatc

SEQ ID NO: 839 - DNA, 20 bp, synthetic construct
  source 1..20: mol_type = other DNA
tgagtttgctgtctgtacat

SEQ ID NO: 840 - DNA, 20 bp, synthetic construct
  source 1..20: mol_type = other DNA
aagaaggcatgcactagact

SEQ ID NO: 841 - DNA, 20 bp, synthetic construct
  source 1..20: mol_type = other DNA
taagaaggcatgcactagac

SEQ ID NO: 842 - DNA, 20 bp, synthetic construct
  source 1..20: mol_type = other DNA
catcacgagactctaagaaa

SEQ ID NO: 843 - DNA, 20 bp, synthetic construct
  source 1..20: mol_type = other DNA
taagaaaaggaaactgaaaa

SEQ ID NO: 844 - DNA, 20 bp, synthetic construct
  source 1..20: mol_type = other DNA
aagaaaaggaaactgaaaac

SEQ ID NO: 845 - DNA, 20 bp, synthetic construct
  source 1..20: mol_type = other DNA
gcagtgccaggttagagaga

SEQ ID NO: 846 - DNA, 20 bp, synthetic construct
  source 1..20: mol_type = other DNA
cgcagtgccaggttagagag

SEQ ID NO: 847 - DNA, 20 bp, synthetic construct
  source 1..20: mol_type = other DNA
ctaacctggcactgcgtcgc

SEQ ID NO: 848 - DNA, 20 bp, synthetic construct
  source 1..20: mol_type = other DNA
caagccagcgacgcagtgcc

SEQ ID NO: 849 - DNA, 20 bp, synthetic construct
  source 1..20: mol_type = other DNA
ctggcactgcgtcgctggct

SEQ ID NO: 850 - DNA, 20 bp, synthetic construct
  source 1..20: mol_type = other DNA
tgcgtcgctggcttggagac

SEQ ID NO: 851 - DNA, 20 bp, synthetic construct
  source 1..20: mol_type = other DNA
gctggcttggagacaggtga

SEQ ID NO: 852 - DNA, 20 bp, synthetic construct
  source 1..20: mol_type = other DNA
gagacaggtgacggtccctg

SEQ ID NO: 853 - DNA, 20 bp, synthetic construct
  source 1..20: mol_type = other DNA
agacaggtgacggtccctgc

SEQ ID NO: 854 - DNA, 20 bp, synthetic construct
  source 1..20: mol_type = other DNA
caatcaggacaaggcccgca

SEQ ID NO: 855 - DNA, 20 bp, synthetic construct
  source 1..20: mol_type = other DNA
ccaatcaggacaaggcccgc

SEQ ID NO: 856 - DNA, 20 bp, synthetic construct
  source 1..20: mol_type = other DNA
cctgcgggccttgtcctgat

SEQ ID NO: 857 - DNA, 20 bp, synthetic construct
  source 1..20: mol_type = other DNA
cgggccttgtcctgattggc

SEQ ID NO: 858 - DNA, 20 bp, synthetic construct
  source 1..20: mol_type = other DNA
aaacgcgtgcccagccaatc

SEQ ID NO: 859 - DNA, 20 bp, synthetic construct
  source 1..20: mol_type = other DNA
gggcacgcgtttaatataag

SEQ ID NO: 860 - DNA, 20 bp, synthetic construct
  source 1..20: mol_type = other DNA
tataagtggaggcgtcgcgc

SEQ ID NO: 861 - DNA, 20 bp, synthetic construct
  source 1..20: mol_type = other DNA
agtggaggcgtcgcgctggc

SEQ ID NO: 862 - DNA, 20 bp, synthetic construct
  source 1..20: mol_type = other DNA
ggccgagatgtctcgctccg

SEQ ID NO: 863 - DNA, 20 bp, synthetic construct
  source 1..20: mol_type = other DNA
ctcgcgctactctctctttc

SEQ ID NO: 864 - DNA, 20 bp, synthetic construct
  source 1..20: mol_type = other DNA
gctactctctctttctggcc

SEQ ID NO: 865 - DNA, 20 bp, synthetic construct
  source 1..20: mol_type = other DNA
agggtaggagagactcacgc

SEQ ID NO: 866 - DNA, 20 bp, synthetic construct
  source 1..20: mol_type = other DNA
tctctcctaccctcccgctc

SEQ ID NO: 867 - DNA, 20 bp, synthetic construct
  source 1..20: mol_type = other DNA
aaggaccagagcgggagggt

SEQ ID NO: 868 - DNA, 20 bp, synthetic construct
  source 1..20: mol_type = other DNA
agaggaaggaccagagcggg

SEQ ID NO: 869 - DNA, 20 bp, synthetic construct
  source 1..20: mol_type = other DNA
gggagaggaaggaccagagc

SEQ ID NO: 870 - DNA, 20 bp, synthetic construct
  source 1..20: mol_type = other DNA
cgggagaggaaggaccagag

SEQ ID NO: 871 - DNA, 20 bp, synthetic construct
  source 1..20: mol_type = other DNA
cagagggtgcagagcgggag

SEQ ID NO: 872 - DNA, 20 bp, synthetic construct
  source 1..20: mol_type = other DNA
ctcccgctctgcaccctctg

SEQ ID NO: 873 - DNA, 20 bp, synthetic construct
  source 1..20: mol_type = other DNA
ggccacagagggtgcagagc

SEQ ID NO: 874 - DNA, 20 bp, synthetic construct
  source 1..20: mol_type = other DNA
gggccacagagggtgcagag

SEQ ID NO: 875 - DNA, 20 bp, synthetic construct
  source 1..20: mol_type = other DNA
agcacagcgagggccacaga

SEQ ID NO: 876 - DNA, 20 bp, synthetic construct
  source 1..20: mol_type = other DNA
gagcacagcgagggccacag

SEQ ID NO: 877 - DNA, 20 bp, synthetic construct
  source 1..20: mol_type = other DNA
ggagcgagagagcacagcga

SEQ ID NO: 878 - DNA, 20 bp, synthetic construct
  source 1..20: mol_type = other DNA
cggagcgagagagcacagcg

SEQ ID NO: 879 - DNA, 20 bp, synthetic construct
  source 1..20: mol_type = other DNA
aacttggagaagggaagtca

SEQ ID NO: 880 - DNA, 20 bp, synthetic construct
  source 1..20: mol_type = other DNA
tcccttctccaagttctcct

SEQ ID NO: 881 - DNA, 20 bp, synthetic construct
  source 1..20: mol_type = other DNA
accaaggagaacttggagaa

SEQ ID NO: 882 - DNA, 20 bp, synthetic construct
  source 1..20: mol_type = other DNA
caccaaggagaacttggaga

SEQ ID NO: 883 - DNA, 20 bp, synthetic construct
  source 1..20: mol_type = other DNA
cttctccaagttctccttgg

SEQ ID NO: 884 - DNA, 20 bp, synthetic construct
  source 1..20: mol_type = other DNA
gcgggccaccaaggagaact

SEQ ID NO: 885 - DNA, 20 bp, synthetic construct
  source 1..20: mol_type = other DNA
ttctccttggtggcccgccg

SEQ ID NO: 886 - DNA, 20 bp, synthetic construct
  source 1..20: mol_type = other DNA
tctccttggtggcccgccgt

SEQ ID NO: 887 - DNA, 20 bp, synthetic construct
  source 1..20: mol_type = other DNA
ctccttggtggcccgccgtg

SEQ ID NO: 888 - DNA, 20 bp, synthetic construct
  source 1..20: mol_type = other DNA
agccccacggcgggccacca

SEQ ID NO: 889 - DNA, 20 bp, synthetic construct
  source 1..20: mol_type = other DNA
gcccgccgtggggctagtcc

SEQ ID NO: 890 - DNA, 20 bp, synthetic construct
  source 1..20: mol_type = other DNA
cccgccgtggggctagtcca

SEQ ID NO: 891 - DNA, 20 bp, synthetic construct
  source 1..20: mol_type = other DNA
ccctggactagccccacggc

SEQ ID NO: 892 - DNA, 20 bp, synthetic construct
  source 1..20: mol_type = other DNA
gccctggactagccccacgg

SEQ ID NO: 893 - DNA, 20 bp, synthetic construct
  source 1..20: mol_type = other DNA
ccagccctggactagcccca

SEQ ID NO: 894 - DNA, 20 bp, synthetic construct
  source 1..20: mol_type = other DNA
ccgtggggctagtccagggc

SEQ ID NO: 895 - DNA, 20 bp, synthetic construct
  source 1..20: mol_type = other DNA
gctagtccagggctggatct

SEQ ID NO: 896 - DNA, 20 bp, synthetic construct
  source 1..20: mol_type = other DNA
ctagtccagggctggatctc

SEQ ID NO: 897 - DNA, 20 bp, synthetic construct
  source 1..20: mol_type = other DNA
tagtccagggctggatctcg

SEQ ID NO: 898 - DNA, 20 bp, synthetic construct
  source 1..20: mol_type = other DNA
gcttccccgagatccagccc

SEQ ID NO: 899 - DNA, 20 bp, synthetic construct
  source 1..20: mol_type = other DNA
agggctggatctcggggaag

SEQ ID NO: 900 - DNA, 20 bp, synthetic construct
  source 1..20: mol_type = other DNA
gctggatctcggggaagcgg

SEQ ID NO: 901 - DNA, 20 bp, synthetic construct
  source 1..20: mol_type = other DNA
ctggatctcggggaagcggc

SEQ ID NO: 902 - DNA, 20 bp, synthetic construct
  source 1..20: mol_type = other DNA
tggatctcggggaagcggcg

SEQ ID NO: 903 - DNA, 20 bp, synthetic construct
  source 1..20: mol_type = other DNA
atctcggggaagcggcgggg

SEQ ID NO: 904 - DNA, 20 bp, synthetic construct
  source 1..20: mol_type = other DNA
ggggaagcggcggggtggcc

SEQ ID NO: 905 - DNA, 20 bp, synthetic construct
  source 1..20: mol_type = other DNA
gggaagcggcggggtggcct

SEQ ID NO: 906 - DNA, 20 bp, synthetic construct
  source 1..20: mol_type = other DNA
gcggcggggtggcctgggag

SEQ ID NO: 907 - DNA, 20 bp, synthetic construct
  source 1..20: mol_type = other DNA
cggcggggtggcctgggagt

SEQ ID NO: 908 - DNA, 20 bp, synthetic construct
  source 1..20: mol_type = other DNA
ggcggggtggcctgggagtg

SEQ ID NO: 909 - DNA, 20 bp, synthetic construct
  source 1..20: mol_type = other DNA
gggtggcctgggagtgggga

SEQ ID NO: 910 - DNA, 20 bp, synthetic construct
  source 1..20: mol_type = other DNA
ggtggcctgggagtggggaa

SEQ ID NO: 911 - DNA, 20 bp, synthetic construct
  source 1..20: mol_type = other DNA
gtggcctgggagtggggaag

SEQ ID NO: 912 - DNA, 20 bp, synthetic construct
  source 1..20: mol_type = other DNA
tggcctgggagtggggaagg

SEQ ID NO: 913 - DNA, 20 bp, synthetic construct
  source 1..20: mol_type = other DNA
tggggaagggggtgcgcacc

SEQ ID NO: 914 - DNA, 20 bp, synthetic construct
  source 1..20: mol_type = other DNA
ggggaagggggtgcgcaccc

SEQ ID NO: 915 - DNA, 20 bp, synthetic construct
  source 1..20: mol_type = other DNA
gggcaagtagcgcgcgtccc

SEQ ID NO: 916 - DNA, 20 bp, synthetic construct
  source 1..20: mol_type = other DNA
ggggcaagtagcgcgcgtcc

SEQ ID NO: 917 - DNA, 20 bp, synthetic construct
  source 1..20: mol_type = other DNA
cgcgcgctacttgccccttt

SEQ ID NO: 918 - DNA, 20 bp, synthetic construct
  source 1..20: mol_type = other DNA
gcgctacttgcccctttcgg

SEQ ID NO: 919 - DNA, 20 bp, synthetic construct
  source 1..20: mol_type = other DNA
cgctacttgcccctttcggc

SEQ ID NO: 920 - DNA, 20 bp, synthetic construct
  source 1..20: mol_type = other DNA
tgcccctttcggcggggagc

SEQ ID NO: 921 - DNA, 20 bp, synthetic construct
  source 1..20: mol_type = other DNA
gcccctttcggcggggagca

SEQ ID NO: 922 - DNA, 20 bp, synthetic construct
  source 1..20: mol_type = other DNA
cccctgctccccgccgaaag

SEQ ID NO: 923 - DNA, 20 bp, synthetic construct
  source 1..20: mol_type = other DNA
cccctttcggcggggagcag

SEQ ID NO: 924 - DNA, 20 bp, synthetic construct
  source 1..20: mol_type = other DNA
tcccctgctccccgccgaaa

SEQ ID NO: 925 - DNA, 20 bp, synthetic construct
  source 1..20: mol_type = other DNA
ctcccctgctccccgccgaa

SEQ ID NO: 926 - DNA, 20 bp, synthetic construct
  source 1..20: mol_type = other DNA
cggggagcaggggagacctt

SEQ ID NO: 927 - DNA, 20 bp, synthetic construct
  source 1..20: mol_type = other DNA
caggggagacctttggccta

SEQ ID NO: 928 - DNA, 20 bp, synthetic construct
  source 1..20: mol_type = other DNA
agacctttggcctacggcga

SEQ ID NO: 929 - DNA, 20 bp, synthetic construct
  source 1..20: mol_type = other DNA
gacctttggcctacggcgac

SEQ ID NO: 930 - DNA, 20 bp, synthetic construct
  source 1..20: mol_type = other DNA
ctcccgtcgccgtaggccaa

SEQ ID NO: 931 - DNA, 20 bp, synthetic construct
  source 1..20: mol_type = other DNA
ctttggcctacggcgacggg

SEQ ID NO: 932 - DNA, 20 bp, synthetic construct
  source 1..20: mol_type = other DNA
tttggcctacggcgacggga

SEQ ID NO: 933 - DNA, 20 bp, synthetic construct
  source 1..20: mol_type = other DNA
gcctacggcgacgggagggt

SEQ ID NO: 934 - DNA, 20 bp, synthetic construct
  source 1..20: mol_type = other DNA
cccgaccctcccgtcgccgt

SEQ ID NO: 935 - DNA, 20 bp, synthetic construct
  source 1..20: mol_type = other DNA
cctacggcgacgggagggtc

SEQ ID NO: 936 - DNA, 20 bp, synthetic construct
  source 1..20: mol_type = other DNA
ggagggtcgggacaaagttt

SEQ ID NO: 937 - DNA, 20 bp, synthetic construct
  source 1..20: mol_type = other DNA
gagggtcgggacaaagttta

SEQ ID NO: 938 - DNA, 20 bp, synthetic construct
  source 1..20: mol_type = other DNA
cgataagcgtcagagcgccg

SEQ ID NO: 939 - DNA, 20 bp, synthetic construct
  source 1..20: mol_type = other DNA
aagcgtcagagcgccgaggt

SEQ ID NO: 940 - DNA, 20 bp, synthetic construct
  source 1..20: mol_type = other DNA
agcgtcagagcgccgaggtt

SEQ ID NO: 941 - DNA, 20 bp, synthetic construct
  source 1..20: mol_type = other DNA
gcgtcagagcgccgaggttg

SEQ ID NO: 942 - DNA, 20 bp, synthetic construct
  source 1..20: mol_type = other DNA
cgtcagagcgccgaggttgg

SEQ ID NO: 943 - DNA, 20 bp, synthetic construct
  source 1..20: mol_type = other DNA
cagagcgccgaggttggggg

SEQ ID NO: 944 - DNA, 20 bp, synthetic construct
  source 1..20: mol_type = other DNA
agagcgccgaggttggggga

SEQ ID NO: 945 - DNA, 20 bp, synthetic construct
  source 1..20: mol_type = other DNA
gagaaaccctcccccaacct

SEQ ID NO: 946 - DNA, 20 bp, synthetic construct
  source 1..20: mol_type = other DNA
gtttctcttccgctctttcg

SEQ ID NO: 947 - DNA, 20 bp, synthetic construct
  source 1..20: mol_type = other DNA
tttctcttccgctctttcgc

SEQ ID NO: 948 - DNA, 20 bp, synthetic construct
  source 1..20: mol_type = other DNA
ttctcttccgctctttcgcg

SEQ ID NO: 949 - DNA, 20 bp, synthetic construct
  source 1..20: mol_type = other DNA
ccagaggccccgcgaaagag

SEQ ID NO: 950 - DNA, 20 bp, synthetic construct
  source 1..20: mol_type = other DNA
ccgctctttcgcggggcctc

SEQ ID NO: 951 - DNA, 20 bp, synthetic construct
  source 1..20: mol_type = other DNA
agctgcgctgggggagccag

SEQ ID NO: 952 - DNA, 20 bp, synthetic construct
  source 1..20: mol_type = other DNA
tctggctcccccagcgcagc

SEQ ID NO: 953 - DNA, 20 bp, synthetic construct
  source 1..20: mol_type = other DNA
ctcccccagcgcagctggag

SEQ ID NO: 954 - DNA, 20 bp, synthetic construct
  source 1..20: mol_type = other DNA
tcccccagcgcagctggagt

SEQ ID NO: 955 - DNA, 20 bp, synthetic construct
  source 1..20: mol_type = other DNA
ccccactccagctgcgctgg

SEQ ID NO: 956 - DNA, 20 bp, synthetic construct
  source 1..20: mol_type = other DNA
cccccagcgcagctggagtg

SEQ ID NO: 957 - DNA, 20 bp, synthetic construct
  source 1..20: mol_type = other DNA
ccccagcgcagctggagtgg

SEQ ID NO: 958 - DNA, 20 bp, synthetic construct
  source 1..20: mol_type = other DNA
cccccactccagctgcgctg

SEQ ID NO: 959 - DNA, 20 bp, synthetic construct
  source 1..20: mol_type = other DNA
tcccccactccagctgcgct

SEQ ID NO: 960 - DNA, 20 bp, synthetic construct
  source 1..20: mol_type = other DNA
gtcccccactccagctgcgc

SEQ ID NO: 961 - DNA, 20 bp, synthetic construct
  source 1..20: mol_type = other DNA
agcgcagctggagtggggga

SEQ ID NO: 962 - DNA, 20 bp, synthetic construct
  source 1..20: mol_type = other DNA
agctggagtgggggacgggt

SEQ ID NO: 963 - DNA, 20 bp, synthetic construct
  source 1..20: mol_type = other DNA
gacgggtaggctcgtcccaa

SEQ ID NO: 964 - DNA, 20 bp, synthetic construct
  source 1..20: mol_type = other DNA
gtaggctcgtcccaaaggcg

SEQ ID NO: 965 - DNA, 20 bp, synthetic construct
  source 1..20: mol_type = other DNA
gtcccaaaggcgcggcgctg

SEQ ID NO: 966 - DNA, 20 bp, synthetic construct
  source 1..20: mol_type = other DNA
aacctcagcgccgcgccttt

SEQ ID NO: 967 - DNA, 20 bp, synthetic construct
  source 1..20: mol_type = other DNA
aaacctcagcgccgcgcctt

SEQ ID NO: 968 - DNA, 20 bp, synthetic construct
  source 1..20: mol_type = other DNA
cgctgaggtttgtgaacgcg

SEQ ID NO: 969 - DNA, 20 bp, synthetic construct
  source 1..20: mol_type = other DNA
tgaggtttgtgaacgcgtgg

SEQ ID NO: 970 - DNA, 20 bp, synthetic construct
  source 1..20: mol_type = other DNA
gaggtttgtgaacgcgtgga

SEQ ID NO: 971 - DNA, 20 bp, synthetic construct
  source 1..20: mol_type = other DNA
aggtttgtgaacgcgtggag

SEQ ID NO: 972 - DNA, 20 bp, synthetic construct
  source 1..20: mol_type = other DNA
tgaacgcgtggaggggcgct

SEQ ID NO: 973 - DNA, 20 bp, synthetic construct
  source 1..20: mol_type = other DNA
gaacgcgtggaggggcgctt

SEQ ID NO: 974 - DNA, 20 bp, synthetic construct
  source 1..20: mol_type = other DNA
aacgcgtggaggggcgcttg

SEQ ID NO: 975 - DNA, 20 bp, synthetic construct
  source 1..20: mol_type = other DNA
gtggaggggcgcttggggtc

SEQ ID NO: 976 - DNA, 20 bp, synthetic construct
  source 1..20: mol_type = other DNA
tggaggggcgcttggggtct

SEQ ID NO: 977 - DNA, 20 bp, synthetic construct
  source 1..20: mol_type = other DNA
ggaggggcgcttggggtctg

SEQ ID NO: 978 - DNA, 20 bp, synthetic construct
  source 1..20: mol_type = other DNA
gaggggcgcttggggtctgg

SEQ ID NO: 979 - DNA, 20 bp, synthetic construct
  source 1..20: mol_type = other DNA
gggcgcttggggtctggggg

SEQ ID NO: 980 - DNA, 20 bp, synthetic construct
  source 1..20: mol_type = other DNA
ggtctgggggaggcgtcgcc

SEQ ID NO: 981 - DNA, 20 bp, synthetic construct
  source 1..20: mol_type = other DNA
gtctgggggaggcgtcgccc

SEQ ID NO: 982 - DNA, 20 bp, synthetic construct
  source 1..20: mol_type = other DNA
cgcagcagacaggcttaccc

SEQ ID NO: 983 - DNA, 20 bp, synthetic construct
  source 1..20: mol_type = other DNA
ccgcagcagacaggcttacc

SEQ ID NO: 984 - DNA, 20 bp, synthetic construct
  source 1..20: mol_type = other DNA
ccgggtaagcctgtctgctg

SEQ ID NO: 985 - DNA, 20 bp, synthetic construct
  source 1..20: mol_type = other DNA
gaagcagagccgcagcagac

SEQ ID NO: 986 - DNA, 20 bp, synthetic construct
  source 1..20: mol_type = other DNA
cggctctgcttcccttagac

SEQ ID NO: 987 - DNA, 20 bp, synthetic construct
  source 1..20: mol_type = other DNA
tcccttagactggagagctg

SEQ ID NO: 988 - DNA, 20 bp, synthetic construct
  source 1..20: mol_type = other DNA
tccacagctctccagtctaa

SEQ ID NO: 989 - DNA, 20 bp, synthetic construct
  source 1..20: mol_type = other DNA
gtccacagctctccagtcta

SEQ ID NO: 990 - DNA, 20 bp, synthetic construct
  source 1..20: mol_type = other DNA
gagagctgtggacttcgtct

SEQ ID NO: 991 - DNA, 20 bp, synthetic construct
  source 1..20: mol_type = other DNA
ctaggacatgcgaacttagc

SEQ ID NO: 992 - DNA, 20 bp, synthetic construct
  source 1..20: mol_type = other DNA
gctaggacatgcgaacttag

SEQ ID NO: 993 - DNA, 20 bp, synthetic construct
  source 1..20: mol_type = other DNA
ttcgcatgtcctagcacctc

SEQ ID NO: 994 - DNA, 20 bp, synthetic construct
  source 1..20: mol_type = other DNA
tcgcatgtcctagcacctct

SEQ ID NO: 995 - DNA, 20 bp, synthetic construct
  source 1..20: mol_type = other DNA
cacatagacccagaggtgct

SEQ ID NO: 996 - DNA, 20 bp, synthetic construct
  source 1..20: mol_type = other DNA
ctagcacctctgggtctatg

SEQ ID NO: 997 - DNA, 20 bp, synthetic construct
  source 1..20: mol_type = other DNA
tagcacctctgggtctatgt

SEQ ID NO: 998 - DNA, 20 bp, synthetic construct
  source 1..20: mol_type = other DNA
agcacctctgggtctatgtg

SEQ ID NO: 999 - DNA, 20 bp, synthetic construct
  source 1..20: mol_type = other DNA
gtggccccacatagacccag

SEQ ID NO: 1000 - DNA, 20 bp, synthetic construct
  source 1..20: mol_type = other DNA
gtctatgtggggccacaccg

SEQ ID NO: 1001 - DNA, 20 bp, synthetic construct
  source 1..20: mol_type = other DNA
tctatgtggggccacaccgt

SEQ ID NO: 1002 - DNA, 20 bp, synthetic construct
  source 1..20: mol_type = other DNA
ctatgtggggccacaccgtg

SEQ ID NO: 1003 - DNA, 20 bp, synthetic construct
  source 1..20: mol_type = other DNA
tgtggggccacaccgtgggg

SEQ ID NO: 1004 - DNA, 20 bp, synthetic construct
  source 1..20: mol_type = other DNA
gctgtttcctccccacggtg

SEQ ID NO: 1005 - DNA, 20 bp, synthetic construct
  source 1..20: mol_type = other DNA
cgcgtgctgtttcctcccca

SEQ ID NO: 1006 - DNA, 20 bp, synthetic construct
  source 1..20: mol_type = other DNA
cgcgacgtttgtagaatgct

SEQ ID NO: 1007 - DNA, 20 bp, synthetic construct
  source 1..20: mol_type = other DNA
tgcttggctgtgatacaaag

SEQ ID NO: 1008 - DNA, 20 bp, synthetic construct
  source 1..20: mol_type = other DNA
cacagaaagatgtcaataac

SEQ ID NO: 1009 - DNA, 20 bp, synthetic construct
  source 1..20: mol_type = other DNA
acacagaaagatgtcaataa

SEQ ID NO: 1010 - DNA, 20 bp, synthetic construct
  source 1..20: mol_type = other DNA
tgacatctttctgtgtgcca

SEQ ID NO: 1011 - DNA, 20 bp, synthetic construct
  source 1..20: mol_type = other DNA
gcgcagctggagtgggggac

SEQ ID NO: 1012 - RNA, 20 nt, synthetic construct
  source 1..20: mol_type = other RNA
ggcgcgcaccccagatcgga

SEQ ID NO: 1013 - RNA, 20 nt, synthetic construct
  source 1..20: mol_type = other RNA
gagtctcgtgatgtttaaga

SEQ ID NO: 1014 - RNA, 20 nt, synthetic construct
  source 1..20: mol_type = other RNA
gaaagtccctctctctaacc

SEQ ID NO: 1015 - RNA, 20 nt, synthetic construct
  source 1..20: mol_type = other RNA
gtgcccagccaatcaggaca

SEQ ID NO: 1016 - RNA, 20 nt, synthetic construct
  source 1..20: mol_type = other RNA
gcccgaatgctgtcagcttc

SEQ ID NO: 1017 - RNA, 20 nt, synthetic construct
  source 1..20: mol_type = other RNA
cgcgagcacagctaaggcca

SEQ ID NO: 1018 - RNA, 20 nt, synthetic construct
  source 1..20: mol_type = other RNA
actctctctttctggcctgg

SEQ ID NO: 1019 - RNA, 20 nt, synthetic construct
  source 1..20: mol_type = other RNA
gaggaaggaccagagcggga

SEQ ID NO: 1020 - RNA, 20 nt, synthetic construct
  source 1..20: mol_type = other RNA
gggccttgtcctgattggct

SEQ ID NO: 1021 - RNA, 20 nt, synthetic construct
  source 1..20: mol_type = other RNA
cacgcgtttaatataagtgg

SEQ ID NO: 1022 - RNA, 20 nt, synthetic construct
  source 1..20: mol_type = other RNA
aagtggaggcgtcgcgctgg

SEQ ID NO: 1023 - RNA, 20 nt, synthetic construct
  source 1..20: mol_type = other RNA
ttcctgaagctgacagcatt

SEQ ID NO: 1024 - RNA, 20 nt, synthetic construct
  source 1..20: mol_type = other RNA
tcctgaagctgacagcattc

SEQ ID NO: 1025 - RNA, 20 nt, synthetic construct
  source 1..20: mol_type = other RNA
ggccacggagcgagacatct

SEQ ID NO: 1026 - RNA, 20 nt, synthetic construct
  source 1..20: mol_type = other RNA
gagtagcgcgagcacagcta

SEQ ID NO: 1027 - RNA, 20 nt, synthetic construct
  source 1..20: mol_type = other RNA
actcacgctggatagcctcc

SEQ ID NO: 1028 - RNA, 20 nt, synthetic construct
  source 1..20: mol_type = other RNA
gggtgcagagcgggagagga

SEQ ID NO: 1029 - RNA, 20 nt, synthetic construct
  source 1..20: mol_type = other RNA
gcacccccttccccactccc

SEQ ID NO: 1030 - RNA, 20 nt, synthetic construct
  source 1..20: mol_type = other RNA
gctacttgcccctttcggcg

SEQ ID NO: 1031 - RNA, 20 nt, synthetic construct
  source 1..20: mol_type = other RNA
tgccagcccctgttctaggg

SEQ ID NO: 1032 - RNA, 20 nt, synthetic construct
  source 1..20: mol_type = other RNA
ttccaccctagaacaggggc

SEQ ID NO: 1033 - RNA, 20 nt, synthetic construct
  source 1..20: mol_type = other RNA
tagtttccaccctagaacag

SEQ ID NO: 1034 - RNA, 20 nt, synthetic construct
  source 1..20: mol_type = other RNA
ttagtttccaccctagaaca

SEQ ID NO: 1035 - RNA, 20 nt, synthetic construct
  source 1..20: mol_type = other RNA
cttagtttccaccctagaac

SEQ ID NO: 1036 - RNA, 20 nt, synthetic construct
  source 1..20: mol_type = other RNA
taagagaatgatgtacctag

SEQ ID NO: 1037 - RNA, 20 nt, synthetic construct
  source 1..20: mol_type = other RNA
aagagaatgatgtacctaga

SEQ ID NO: 1038 - RNA, 20 nt, synthetic construct
  source 1..20: mol_type = other RNA
atgatgtacctagagggcgc

SEQ ID NO: 1039 - RNA, 20 nt, synthetic construct
  source 1..20: mol_type = other RNA
tagagcttccagcgccctct

SEQ ID NO: 1040 - RNA, 20 nt, synthetic construct
  source 1..20: mol_type = other RNA
agtaaaagcagtaactgcta

SEQ ID NO: 1041 - RNA, 20 nt, synthetic construct
  source 1..20: mol_type = other RNA
tagtaaaagcagtaactgct

SEQ ID NO: 1042 - RNA, 20 nt, synthetic construct
  source 1..20: mol_type = other RNA
tgatttgtcggggggcgggg

SEQ ID NO: 1043 - RNA, 20 nt, synthetic construct
  source 1..20: mol_type = other RNA
ttgatttgtcggggggcggg

SEQ ID NO: 1044 - RNA, 20 nt, synthetic construct
  source 1..20: mol_type = other RNA
gttgatttgtcggggggcgg

SEQ ID NO: 1045 - RNA, 20 nt, synthetic construct
  source 1..20: mol_type = other RNA
tgttgatttgtcggggggcg

SEQ ID NO: 1046 - RNA, 20 nt, synthetic construct
  source 1..20: mol_type = other RNA
ctgttgatttgtcggggggc

SEQ ID NO: 1047 - RNA, 20 nt, synthetic construct
  source 1..20: mol_type = other RNA
tctgttgatttgtcgggggg

SEQ ID NO: 1048 - RNA, 20 nt, synthetic construct
  source 1..20: mol_type = other RNA
tgttctgttgatttgtcggg

SEQ ID NO: 1049 - RNA, 20 nt, synthetic construct
  source 1..20: mol_type = other RNA
ttgttctgttgatttgtcgg

SEQ ID NO: 1050 - RNA, 20 nt, synthetic construct
  source 1..20: mol_type = other RNA
tttgttctgttgatttgtcg

SEQ ID NO: 1051 - RNA, 20 nt, synthetic construct
  source 1..20: mol_type = other RNA
ctttgttctgttgatttgtc

SEQ ID NO: 1052 - RNA, 20 nt, synthetic construct
  source 1..20: mol_type = other RNA
tctttgttctgttgatttgt

SEQ ID NO: 1053 - RNA, 20 nt, synthetic construct
  source 1..20: mol_type = other RNA
agaaaattacctaaacagca

SEQ ID NO: 1054 - RNA, 20 nt, synthetic construct
  source 1..20: mol_type = other RNA
tacctaaacagcaaggacat

SEQ ID NO: 1055 - RNA, 20 nt, synthetic construct
  source 1..20: mol_type = other RNA
acctaaacagcaaggacata

SEQ ID NO: 1056 - RNA, 20 nt, synthetic construct
  source 1..20: mol_type = other RNA
tccctatgtccttgctgttt

SEQ ID NO: 1057 - RNA, 20 nt, synthetic construct
  source 1..20: mol_type = other RNA
taaacagcaaggacataggg

SEQ ID NO: 1058 - RNA, 20 nt, synthetic construct
  source 1..20: mol_type = other RNA
ggacatagggaggaacttct

SEQ ID NO: 1059 - RNA, 20 nt, synthetic construct
  source 1..20: mol_type = other RNA
tcccttcaggaaaaagtgtt

SEQ ID NO: 1060 - RNA, 20 nt, synthetic construct
  source 1..20: mol_type = other RNA
cttgcttcttgtatcccttc

SEQ ID NO: 1061 - RNA, 20 nt, synthetic construct
  source 1..20: mol_type = other RNA
agggatacaagaagcaagaa

SEQ ID NO: 1062 - RNA, 20 nt, synthetic construct
  source 1..20: mol_type = other RNA
aagaaaggtactctttcact

SEQ ID NO: 1063 - RNA, 20 nt, synthetic construct
  source 1..20: mol_type = other RNA
accttctctgagctgtcctc

SEQ ID NO: 1064 - RNA, 20 nt, synthetic construct
  source 1..20: mol_type = other RNA
tcctgaggacagctcagaga

SEQ ID NO: 1065 - RNA, 20 nt, synthetic construct
  source 1..20: mol_type = other RNA
atagtcccaaaagcatcctg

SEQ ID NO: 1066 - RNA, 20 nt, synthetic construct
  source 1..20: mol_type = other RNA
gcagggtttctccattctct

SEQ ID NO: 1067 - RNA, 20 nt, synthetic construct
  source 1..20: mol_type = other RNA
tgcagggtttctccattctc

SEQ ID NO: 1068 - RNA, 20 nt, synthetic construct
  source 1..20: mol_type = other RNA
agagaatggagaaaccctgc

SEQ ID NO: 1069 - RNA, 20 nt, synthetic construct
  source 1..20: mol_type = other RNA
gagaatggagaaaccctgca

SEQ ID NO: 1070 - RNA, 20 nt, synthetic construct
  source 1..20: mol_type = other RNA
cagcttgggaattccctgca

SEQ ID NO: 1071 - RNA, 20 nt, synthetic construct
  source 1..20: mol_type = other RNA
acagcttgggaattccctgc

SEQ ID NO: 1072 - RNA, 20 nt, synthetic construct
  source 1..20: mol_type = other RNA
tctgtttataactacagctt

SEQ ID NO: 1073 - RNA, 20 nt, synthetic construct
  source 1..20: mol_type = other RNA
ttctgtttataactacagct

SEQ ID NO: 1074 - RNA, 20 nt, synthetic construct
  source 1..20: mol_type = other RNA
acagaagttctccttctgct

SEQ ID NO: 1075 - RNA, 20 nt, synthetic construct
  source 1..20: mol_type = other RNA
tttgaatgctacctagcaga

SEQ ID NO: 1076 - RNA, 20 nt, synthetic construct
  source 1..20: mol_type = other RNA
attcaaagatcttaatcttc

SEQ ID NO: 1077 - RNA, 20 nt, synthetic construct
  source 1..20: mol_type = other RNA
ttcaaagatcttaatcttct

SEQ ID NO: 1078 - RNA, 20 nt, synthetic construct
  source 1..20: mol_type = other RNA
tgcaggtccgagcagttaac

SEQ ID NO: 1079 - RNA, 20 nt, synthetic construct
  source 1..20: mol_type = other RNA
ggtccgagcagttaactggc

SEQ ID NO: 1080 - RNA, 20 nt, synthetic construct
  source 1..20: mol_type = other RNA
gtccgagcagttaactggct

SEQ ID NO: 1081 - RNA, 20 nt, synthetic construct
  source 1..20: mol_type = other RNA
tccgagcagttaactggctg

SEQ ID NO: 1082 - RNA, 20 nt, synthetic construct
  source 1..20: mol_type = other RNA
gccccagccagttaactgct

SEQ ID NO: 1083 - RNA, 20 nt, synthetic construct
  source 1..20: mol_type = other RNA
gatgctaagtgacttgctaa

SEQ ID NO: 1084 - RNA, 20 nt, synthetic construct
  source 1..20: mol_type = other RNA
agcaagtcacttagcatctc

SEQ ID NO: 1085 - RNA, 20 nt, synthetic construct
  source 1..20: mol_type = other RNA
gcaagtcacttagcatctct

SEQ ID NO: 1086 - RNA, 20 nt, synthetic construct
  source 1..20: mol_type = other RNA
caagtcacttagcatctctg

SEQ ID NO: 1087 - RNA, 20 nt, synthetic construct
  source 1..20: mol_type = other RNA
tggggccagtctgcaaagcg

SEQ ID NO: 1088 - RNA, 20 nt, synthetic construct
  source 1..20: mol_type = other RNA
ggggccagtctgcaaagcga

SEQ ID NO: 1089 - RNA, 20 nt, synthetic construct
  source 1..20: mol_type = other RNA
gggccagtctgcaaagcgag

SEQ ID NO: 1090 - RNA, 20 nt, synthetic construct
  source 1..20: mol_type = other RNA
ggccagtctgcaaagcgagg

SEQ ID NO: 1091 - RNA, 20 nt, synthetic construct
  source 1..20: mol_type = other RNA
tgccccctcgctttgcagac

SEQ ID NO: 1092 - RNA, 20 nt, synthetic construct
  source 1..20: mol_type = other RNA
ttcaggctggaggcacatta

SEQ ID NO: 1093 - RNA, 20 nt, synthetic construct
  source 1..20: mol_type = other RNA
attctaggacttcaggctgg

SEQ ID NO: 1094 - RNA, 20 nt, synthetic construct
  source 1..20: mol_type = other RNA
ctcattctaggacttcaggc

SEQ ID NO: 1095 - RNA, 20 nt, synthetic construct
  source 1..20: mol_type = other RNA
ggcgctcattctaggacttc

SEQ ID NO: 1096 - RNA, 20 nt, synthetic construct
  source 1..20: mol_type = other RNA
gaagtcctagaatgagcgcc

SEQ ID NO: 1097 - RNA, 20 nt, synthetic construct
  source 1..20: mol_type = other RNA
ggacaccgggcgctcattct

SEQ ID NO: 1098 - RNA, 20 nt, synthetic construct
  source 1..20: mol_type = other RNA
gagcgcccggtgtcccaagc

SEQ ID NO: 1099 - RNA, 20 nt, synthetic construct
  source 1..20: mol_type = other RNA
agcgcccggtgtcccaagct

SEQ ID NO: 1100 - RNA, 20 nt, synthetic construct
  source 1..20: mol_type = other RNA
gcgcccggtgtcccaagctg

SEQ ID NO: 1101 - RNA, 20 nt, synthetic construct
  source 1..20: mol_type = other RNA
gcgccccagcttgggacacc

SEQ ID NO: 1102 - RNA, 20 nt, synthetic construct
  source 1..20: mol_type = other RNA
cgcgccccagcttgggacac

SEQ ID NO: 1103 - RNA, 20 nt, synthetic construct
  source 1..20: mol_type = other RNA
tggggtgcgcgccccagctt

SEQ ID NO: 1104 - RNA, 20 nt, synthetic construct
  source 1..20: mol_type = other RNA
ctggggtgcgcgccccagct

SEQ ID NO: 1105 - RNA, 20 nt, synthetic construct
  source 1..20: mol_type = other RNA
ctggggcgcgcaccccagat

SEQ ID NO: 1106 - RNA, 20 nt, synthetic construct
  source 1..20: mol_type = other RNA
gggcgcgcaccccagatcgg

SEQ ID NO: 1107 - RNA, 20 nt, synthetic construct
  source 1..20: mol_type = other RNA
catcggcgccctccgatctg

SEQ ID NO: 1108 - RNA, 20 nt, synthetic construct
  source 1..20: mol_type = other RNA
acatcggcgccctccgatct

SEQ ID NO: 1109 - RNA, 20 nt, synthetic construct
  source 1..20: mol_type = other RNA
tacatcggcgccctccgatc

SEQ ID NO: 1110 - RNA, 20 nt, synthetic construct
  source 1..20: mol_type = other RNA
tgagtttgctgtctgtacat

SEQ ID NO: 1111 - RNA, 20 nt, synthetic construct
  source 1..20: mol_type = other RNA
aagaaggcatgcactagact

SEQ ID NO: 1112 - RNA, 20 nt, synthetic construct
  source 1..20: mol_type = other RNA
taagaaggcatgcactagac

SEQ ID NO: 1113 - RNA, 20 nt, synthetic construct
  source 1..20: mol_type = other RNA
catcacgagactctaagaaa

SEQ ID NO: 1114 - RNA, 20 nt, synthetic construct
  source 1..20: mol_type = other RNA
taagaaaaggaaactgaaaa

SEQ ID NO: 1115 - RNA, 20 nt, synthetic construct
  source 1..20: mol_type = other RNA
aagaaaaggaaactgaaaac

SEQ ID NO: 1116 - RNA, 20 nt, synthetic construct
  source 1..20: mol_type = other RNA
gcagtgccaggttagagaga

SEQ ID NO: 1117 - RNA, 20 nt, synthetic construct
  source 1..20: mol_type = other RNA
cgcagtgccaggttagagag

SEQ ID NO: 1118 - RNA, 20 nt, synthetic construct
  source 1..20: mol_type = other RNA
ctaacctggcactgcgtcgc

SEQ ID NO: 1119 - RNA, 20 nt, synthetic construct
  source 1..20: mol_type = other RNA
caagccagcgacgcagtgcc

SEQ ID NO: 1120 - RNA, 20 nt, synthetic construct
  source 1..20: mol_type = other RNA
ctggcactgcgtcgctggct

SEQ ID NO: 1121 - RNA, 20 nt, synthetic construct
  source 1..20: mol_type = other RNA
tgcgtcgctggcttggagac

SEQ ID NO: 1122 - RNA, 20 nt, synthetic construct
  source 1..20: mol_type = other RNA
gctggcttggagacaggtga

SEQ ID NO: 1123 - RNA, 20 nt, synthetic construct
  source 1..20: mol_type = other RNA
gagacaggtgacggtccctg

SEQ ID NO: 1124 - RNA, 20 nt, synthetic construct
  source 1..20: mol_type = other RNA
agacaggtgacggtccctgc

SEQ ID NO: 1125 - RNA, 20 nt, synthetic construct
  source 1..20: mol_type = other RNA
caatcaggacaaggcccgca

SEQ ID NO: 1126 - RNA, 20 nt, synthetic construct
  source 1..20: mol_type = other RNA
ccaatcaggacaaggcccgc

SEQ ID NO: 1127 - RNA, 20 nt, synthetic construct
  source 1..20: mol_type = other RNA
cctgcgggccttgtcctgat

SEQ ID NO: 1128 - RNA, 20 nt, synthetic construct
  source 1..20: mol_type = other RNA
cgggccttgtcctgattggc

SEQ ID NO: 1129 - RNA, 20 nt, synthetic construct
  source 1..20: mol_type = other RNA
aaacgcgtgcccagccaatc

SEQ ID NO: 1130 - RNA, 20 nt, synthetic construct
  source 1..20: mol_type = other RNA
gggcacgcgtttaatataag

SEQ ID NO: 1131 - RNA, 20 nt, synthetic construct
  source 1..20: mol_type = other RNA
tataagtggaggcgtcgcgc

SEQ ID NO: 1132 - RNA, 20 nt, synthetic construct
  source 1..20: mol_type = other RNA
agtggaggcgtcgcgctggc

SEQ ID NO: 1133 - RNA, 20 nt, synthetic construct
  source 1..20: mol_type = other RNA
ggccgagatgtctcgctccg

SEQ ID NO: 1134 - RNA, 20 nt, synthetic construct
  source 1..20: mol_type = other RNA
ctcgcgctactctctctttc

SEQ ID NO: 1135 - RNA, 20 nt, synthetic construct
  source 1..20: mol_type = other RNA
gctactctctctttctggcc

SEQ ID NO: 1136 - RNA, 20 nt, synthetic construct
  source 1..20: mol_type = other RNA
agggtaggagagactcacgc

SEQ ID NO: 1137 - RNA, 20 nt, synthetic construct
  source 1..20: mol_type = other RNA
tctctcctaccctcccgctc

SEQ ID NO: 1138 - RNA, 20 nt, synthetic construct
  source 1..20: mol_type = other RNA
aaggaccagagcgggagggt

SEQ ID NO: 1139 - RNA, 20 nt, synthetic construct
  source 1..20: mol_type = other RNA
agaggaaggaccagagcggg

SEQ ID NO: 1140 - RNA, 20 nt, synthetic construct
  source 1..20: mol_type = other RNA
gggagaggaaggaccagagc

SEQ ID NO: 1141 - RNA, 20 nt, synthetic construct
  source 1..20: mol_type = other RNA
cgggagaggaaggaccagag

SEQ ID NO: 1142 - RNA, 20 nt, synthetic construct
  source 1..20: mol_type = other RNA
cagagggtgcagagcgggag

SEQ ID NO: 1143 - RNA, 20 nt, synthetic construct
  source 1..20: mol_type = other RNA
ctcccgctctgcaccctctg

SEQ ID NO: 1144 - RNA, 20 nt, synthetic construct
  source 1..20: mol_type = other RNA
ggccacagagggtgcagagc

SEQ ID NO: 1145 - RNA, 20 nt, synthetic construct
  source 1..20: mol_type = other RNA
gggccacagagggtgcagag

SEQ ID NO: 1146 - RNA, 20 nt, synthetic construct
  source 1..20: mol_type = other RNA
agcacagcgagggccacaga

SEQ ID NO: 1147 - RNA, 20 nt, synthetic construct
  source 1..20: mol_type = other RNA
gagcacagcgagggccacag

SEQ ID NO: 1148 - RNA, 20 nt, synthetic construct
  source 1..20: mol_type = other RNA
ggagcgagagagcacagcga

SEQ ID NO: 1149 - RNA, 20 nt, synthetic construct
  source 1..20: mol_type = other RNA
cggagcgagagagcacagcg

SEQ ID NO: 1150 - RNA, 20 nt, synthetic construct
  source 1..20: mol_type = other RNA
aacttggagaagggaagtca

SEQ ID NO: 1151 - RNA, 20 nt, synthetic construct
  source 1..20: mol_type = other RNA
tcccttctccaagttctcct

SEQ ID NO: 1152 - RNA, 20 nt, synthetic construct
  source 1..20: mol_type = other RNA
accaaggagaacttggagaa

SEQ ID NO: 1153 - RNA, 20 nt, synthetic construct
  source 1..20: mol_type = other RNA
caccaaggagaacttggaga

SEQ ID NO: 1154 - RNA, 20 nt, synthetic construct
  source 1..20: mol_type = other RNA
cttctccaagttctccttgg

SEQ ID NO: 1155 - RNA, 20 nt, synthetic construct
  source 1..20: mol_type = other RNA
gcgggccaccaaggagaact

SEQ ID NO: 1156 - RNA, 20 nt, synthetic construct
  source 1..20: mol_type = other RNA
ttctccttggtggcccgccg

SEQ ID NO: 1157 - RNA, 20 nt, synthetic construct
  source 1..20: mol_type = other RNA
tctccttggtggcccgccgt

SEQ ID NO: 1158 - RNA, 20 nt, synthetic construct
  source 1..20: mol_type = other RNA
ctccttggtggcccgccgtg

SEQ ID NO: 1159 - RNA, 20 nt, synthetic construct
  source 1..20: mol_type = other RNA
agccccacggcgggccacca

SEQ ID NO: 1160 - RNA, 20 nt, synthetic construct
  source 1..20: mol_type = other RNA
gcccgccgtggggctagtcc

SEQ ID NO: 1161 - RNA, 20 nt, synthetic construct
  source 1..20: mol_type = other RNA
cccgccgtggggctagtcca

SEQ ID NO: 1162 - RNA, 20 nt, synthetic construct
  source 1..20: mol_type = other RNA
ccctggactagccccacggc

SEQ ID NO: 1163 - RNA, 20 nt, synthetic construct
  source 1..20: mol_type = other RNA
gccctggactagccccacgg

SEQ ID NO: 1164 - RNA, 20 nt, synthetic construct
  source 1..20: mol_type = other RNA
ccagccctggactagcccca

SEQ ID NO: 1165 - RNA, 20 nt, synthetic construct
  source 1..20: mol_type = other RNA
ccgtggggctagtccagggc

SEQ ID NO: 1166 - RNA, 20 nt, synthetic construct
  source 1..20: mol_type = other RNA
gctagtccagggctggatct

SEQ ID NO: 1167 - RNA, 20 nt, synthetic construct
  source 1..20: mol_type = other RNA
ctagtccagggctggatctc

SEQ ID NO: 1168 - RNA, 20 nt, synthetic construct
  source 1..20: mol_type = other RNA
tagtccagggctggatctcg

SEQ ID NO: 1169 - RNA, 20 nt, synthetic construct
  source 1..20: mol_type = other RNA
gcttccccgagatccagccc

SEQ ID NO: 1170 - RNA, 20 nt, synthetic construct
  source 1..20: mol_type = other RNA
agggctggatctcggggaag

SEQ ID NO: 1171 - RNA, 20 nt, synthetic construct
  source 1..20: mol_type = other RNA
gctggatctcggggaagcgg

SEQ ID NO: 1172 - RNA, 20 nt, synthetic construct
  source 1..20: mol_type = other RNA
ctggatctcggggaagcggc

SEQ ID NO: 1173 - RNA, 20 nt, synthetic construct
  source 1..20: mol_type = other RNA
tggatctcggggaagcggcg

SEQ ID NO: 1174 - RNA, 20 nt, synthetic construct
  source 1..20: mol_type = other RNA
atctcggggaagcggcgggg

SEQ ID NO: 1175 - RNA, 20 nt, synthetic construct
  source 1..20: mol_type = other RNA
ggggaagcggcggggtggcc

SEQ ID NO: 1176 - RNA, 20 nt, synthetic construct
  source 1..20: mol_type = other RNA
gggaagcggcggggtggcct

SEQ ID NO: 1177 - RNA, 20 nt, synthetic construct
  source 1..20: mol_type = other RNA
gcggcggggtggcctgggag

SEQ ID NO: 1178 - RNA, 20 nt, synthetic construct
  source 1..20: mol_type = other RNA
cggcggggtggcctgggagt

SEQ ID NO: 1179 - RNA, 20 nt, synthetic construct
  source 1..20: mol_type = other RNA
ggcggggtggcctgggagtg

SEQ ID NO: 1180 - RNA, 20 nt, synthetic construct
  source 1..20: mol_type = other RNA
gggtggcctgggagtgggga

SEQ ID NO: 1181 - RNA, 20 nt, synthetic construct
  source 1..20: mol_type = other RNA
ggtggcctgggagtggggaa

SEQ ID NO: 1182 - RNA, 20 nt, synthetic construct
  source 1..20: mol_type = other RNA
gtggcctgggagtggggaag

SEQ ID NO: 1183 - RNA, 20 nt, synthetic construct
  source 1..20: mol_type = other RNA
tggcctgggagtggggaagg

SEQ ID NO: 1184 - RNA, 20 nt, synthetic construct
  source 1..20: mol_type = other RNA
tggggaagggggtgcgcacc

SEQ ID NO: 1185 - RNA, 20 nt, synthetic construct
  source 1..20: mol_type = other RNA
ggggaagggggtgcgcaccc

SEQ ID NO: 1186 - RNA, 20 nt, synthetic construct
  source 1..20: mol_type = other RNA
gggcaagtagcgcgcgtccc

SEQ ID NO: 1187 - RNA, 20 nt, synthetic construct
  source 1..20: mol_type = other RNA
ggggcaagtagcgcgcgtcc

SEQ ID NO: 1188 - RNA, 20 nt, synthetic construct
  source 1..20: mol_type = other RNA
cgcgcgctacttgccccttt

SEQ ID NO: 1189 - RNA, 20 nt, synthetic construct
  source 1..20: mol_type = other RNA
gcgctacttgcccctttcgg

SEQ ID NO: 1190 - RNA, 20 nt, synthetic construct
  source 1..20: mol_type = other RNA
cgctacttgcccctttcggc

SEQ ID NO: 1191 - RNA, 20 nt, synthetic construct
  source 1..20: mol_type = other RNA
tgcccctttcggcggggagc

SEQ ID NO: 1192 - RNA, 20 nt, synthetic construct
  source 1..20: mol_type = other RNA
gcccctttcggcggggagca

SEQ ID NO: 1193 - RNA, 20 nt, synthetic construct
  source 1..20: mol_type = other RNA
cccctgctccccgccgaaag

SEQ ID NO: 1194 - RNA, 20 nt, synthetic construct
  source 1..20: mol_type = other RNA
cccctttcggcggggagcag

SEQ ID NO: 1195 - RNA, 20 nt, synthetic construct
  source 1..20: mol_type = other RNA
tcccctgctccccgccgaaa

SEQ ID NO: 1196 - RNA, 20 nt, synthetic construct
  source 1..20: mol_type = other RNA
ctcccctgctccccgccgaa

SEQ ID NO: 1197 - RNA, 20 nt, synthetic construct
  source 1..20: mol_type = other RNA
cggggagcaggggagacctt

SEQ ID NO: 1198 - RNA, 20 nt, synthetic construct
  source 1..20: mol_type = other RNA
caggggagacctttggccta

SEQ ID NO: 1199 - RNA, 20 nt, synthetic construct
  source 1..20: mol_type = other RNA
agacctttggcctacggcga

SEQ ID NO: 1200 - RNA, 20 nt, synthetic construct
  source 1..20: mol_type = other RNA
gacctttggcctacggcgac

SEQ ID NO: 1201 - RNA, 20 nt, synthetic construct
  source 1..20: mol_type = other RNA
ctcccgtcgccgtaggccaa

SEQ ID NO: 1202 - RNA, 20 nt, synthetic construct
  source 1..20: mol_type = other RNA
ctttggcctacggcgacggg

SEQ ID NO: 1203 - RNA, 20 nt, synthetic construct
  source 1..20: mol_type = other RNA
tttggcctacggcgacggga

SEQ ID NO: 1204 - RNA, 20 nt, synthetic construct
  source 1..20: mol_type = other RNA
gcctacggcgacgggagggt

SEQ ID NO: 1205 - RNA, 20 nt, synthetic construct
  source 1..20: mol_type = other RNA
cccgaccctcccgtcgccgt

SEQ ID NO: 1206 - RNA, 20 nt, synthetic construct
  source 1..20: mol_type = other RNA
cctacggcgacgggagggtc

SEQ ID NO: 1207 - RNA, 20 nt, synthetic construct
  source 1..20: mol_type = other RNA
ggagggtcgggacaaagttt

SEQ ID NO: 1208 - RNA, 20 nt, synthetic construct
  source 1..20: mol_type = other RNA
gagggtcgggacaaagttta

SEQ ID NO: 1209 - RNA, 20 nt, synthetic construct
  source 1..20: mol_type = other RNA
cgataagcgtcagagcgccg

SEQ ID NO: 1210 - RNA, 20 nt, synthetic construct
  source 1..20: mol_type = other RNA
aagcgtcagagcgccgaggt

SEQ ID NO: 1211 - RNA, 20 nt, synthetic construct
  source 1..20: mol_type = other RNA
agcgtcagagcgccgaggtt

SEQ ID NO: 1212 - RNA, 20 nt, synthetic construct
  source 1..20: mol_type = other RNA
gcgtcagagcgccgaggttg

SEQ ID NO: 1213 - RNA, 20 nt, synthetic construct
  source 1..20: mol_type = other RNA
cgtcagagcgccgaggttgg

SEQ ID NO: 1214 - RNA, 20 nt, synthetic construct
  source 1..20: mol_type = other RNA
cagagcgccgaggttggggg

SEQ ID NO: 1215 - RNA, 20 nt, synthetic construct
  source 1..20: mol_type = other RNA
agagcgccgaggttggggga

SEQ ID NO: 1216 - RNA, 20 nt, synthetic construct
  source 1..20: mol_type = other RNA
gagaaaccctcccccaacct

SEQ ID NO: 1217 - RNA, 20 nt, synthetic construct
  source 1..20: mol_type = other RNA
gtttctcttccgctctttcg

SEQ ID NO: 1218 - RNA, 20 nt, synthetic construct
  source 1..20: mol_type = other RNA
tttctcttccgctctttcgc

SEQ ID NO: 1219 - RNA, 20 nt, synthetic construct
  source 1..20: mol_type = other RNA
ttctcttccgctctttcgcg

SEQ ID NO: 1220 - RNA, 20 nt, synthetic construct
  source 1..20: mol_type = other RNA
ccagaggccccgcgaaagag

SEQ ID NO: 1221 - RNA, 20 nt, synthetic construct
  source 1..20: mol_type = other RNA
ccgctctttcgcggggcctc

SEQ ID NO: 1222 - RNA, 20 nt, synthetic construct
  source 1..20: mol_type = other RNA
agctgcgctgggggagccag

SEQ ID NO: 1223 - RNA, 20 nt, synthetic construct
  source 1..20: mol_type = other RNA
tctggctcccccagcgcagc

SEQ ID NO: 1224 - RNA, 20 nt, synthetic construct
  source 1..20: mol_type = other RNA
ctcccccagcgcagctggag

SEQ ID NO: 1225 - RNA, 20 nt, synthetic construct
  source 1..20: mol_type = other RNA
tcccccagcgcagctggagt

SEQ ID NO: 1226 - RNA, 20 nt, synthetic construct
  source 1..20: mol_type = other RNA
ccccactccagctgcgctgg

SEQ ID NO: 1227 - RNA, 20 nt, synthetic construct
  source 1..20: mol_type = other RNA
cccccagcgcagctggagtg

SEQ ID NO: 1228 - RNA, 20 nt, synthetic construct
  source 1..20: mol_type = other RNA
ccccagcgcagctggagtgg

SEQ ID NO: 1229 - RNA, 20 nt, synthetic construct
  source 1..20: mol_type = other RNA
cccccactccagctgcgctg

SEQ ID NO: 1230 - RNA, 20 nt, synthetic construct
  source 1..20: mol_type = other RNA
tcccccactccagctgcgct

SEQ ID NO: 1231 - RNA, 20 nt, synthetic construct
  source 1..20: mol_type = other RNA
gtcccccactccagctgcgc

SEQ ID NO: 1232 - RNA, 20 nt, synthetic construct
  source 1..20: mol_type = other RNA
agcgcagctggagtggggga

SEQ ID NO: 1233 - RNA, 20 nt, synthetic construct
  source 1..20: mol_type = other RNA
agctggagtgggggacgggt

SEQ ID NO: 1234 - RNA, 20 nt, synthetic construct
  source 1..20: mol_type = other RNA
gacgggtaggctcgtcccaa

SEQ ID NO: 1235 - RNA, 20 nt, synthetic construct
  source 1..20: mol_type = other RNA
gtaggctcgtcccaaaggcg

SEQ ID NO: 1236 - RNA, 20 nt, synthetic construct
  source 1..20: mol_type = other RNA
gtcccaaaggcgcggcgctg

SEQ ID NO: 1237 - RNA, 20 nt, synthetic construct
  source 1..20: mol_type = other RNA
aacctcagcgccgcgccttt

SEQ ID NO: 1238 - RNA, 20 nt, synthetic construct
  source 1..20: mol_type = other RNA
aaacctcagcgccgcgcctt

SEQ ID NO: 1239 - RNA, 20 nt, synthetic construct
  source 1..20: mol_type = other RNA
cgctgaggtttgtgaacgcg

SEQ ID NO: 1240 - RNA, 20 nt, synthetic construct
  source 1..20: mol_type = other RNA
tgaggtttgtgaacgcgtgg

SEQ ID NO: 1241 - RNA, 20 nt, synthetic construct
  source 1..20: mol_type = other RNA
gaggtttgtgaacgcgtgga

SEQ ID NO: 1242 - RNA, 20 nt, synthetic construct
  source 1..20: mol_type = other RNA
aggtttgtgaacgcgtggag

SEQ ID NO: 1243 - RNA, 20 nt, synthetic construct
  source 1..20: mol_type = other RNA
tgaacgcgtggaggggcgct

SEQ ID NO: 1244 - RNA, 20 nt, synthetic construct
  source 1..20: mol_type = other RNA
gaacgcgtggaggggcgctt

SEQ ID NO: 1245 - RNA, 20 nt, synthetic construct
  source 1..20: mol_type = other RNA
aacgcgtggaggggcgcttg

SEQ ID NO: 1246 - RNA, 20 nt, synthetic construct
  source 1..20: mol_type = other RNA
gtggaggggcgcttggggtc

SEQ ID NO: 1247 - RNA, 20 nt, synthetic construct
  source 1..20: mol_type = other RNA
tggaggggcgcttggggtct

SEQ ID NO: 1248 - RNA, 20 nt, synthetic construct
  source 1..20: mol_type = other RNA
ggaggggcgcttggggtctg

SEQ ID NO: 1249 - RNA, 20 nt, synthetic construct
  source 1..20: mol_type = other RNA
gaggggcgcttggggtctgg

SEQ ID NO: 1250 - RNA, 20 nt, synthetic construct
  source 1..20: mol_type = other RNA
gggcgcttggggtctggggg

SEQ ID NO: 1251 - RNA, 20 nt, synthetic construct
  source 1..20: mol_type = other RNA
ggtctgggggaggcgtcgcc

SEQ ID NO: 1252 - RNA, 20 nt, synthetic construct
  source 1..20: mol_type = other RNA
gtctgggggaggcgtcgccc

SEQ ID NO: 1253 - RNA, 20 nt, synthetic construct
  source 1..20: mol_type = other RNA
cgcagcagacaggcttaccc

SEQ ID NO: 1254 - RNA, 20 nt, synthetic construct
  source 1..20: mol_type = other RNA
ccgcagcagacaggcttacc

SEQ ID NO: 1255 - RNA, 20 nt, synthetic construct
  source 1..20: mol_type = other RNA
ccgggtaagcctgtctgctg

SEQ ID NO: 1256 - RNA, 20 nt, synthetic construct
  source 1..20: mol_type = other RNA
gaagcagagccgcagcagac

SEQ ID NO: 1257 - RNA, 20 nt, synthetic construct
  source 1..20: mol_type = other RNA
cggctctgcttcccttagac

SEQ ID NO: 1258 - RNA, 20 nt, synthetic construct
  source 1..20: mol_type = other RNA
tcccttagactggagagctg

SEQ ID NO: 1259 - RNA, 20 nt, synthetic construct
  source 1..20: mol_type = other RNA
tccacagctctccagtctaa

SEQ ID NO: 1260 - RNA, 20 nt, synthetic construct
  source 1..20: mol_type = other RNA
gtccacagctctccagtcta

SEQ ID NO: 1261 - RNA, 20 nt, synthetic construct
  source 1..20: mol_type = other RNA
gagagctgtggacttcgtct

SEQ ID NO: 1262 - RNA, 20 nt, synthetic construct
  source 1..20: mol_type = other RNA
ctaggacatgcgaacttagc

SEQ ID NO: 1263 - RNA, 20 nt, synthetic construct
  source 1..20: mol_type = other RNA
gctaggacatgcgaacttag

SEQ ID NO: 1264 - RNA, 20 nt, synthetic construct
  source 1..20: mol_type = other RNA
ttcgcatgtcctagcacctc

SEQ ID NO: 1265 - RNA, 20 nt, synthetic construct
  source 1..20: mol_type = other RNA
tcgcatgtcctagcacctct

SEQ ID NO: 1266 - RNA, 20 nt, synthetic construct
  source 1..20: mol_type = other RNA
cacatagacccagaggtgct

SEQ ID NO: 1267 - RNA, 20 nt, synthetic construct
  source 1..20: mol_type = other RNA
ctagcacctctgggtctatg

SEQ ID NO: 1268 - RNA, 20 nt, synthetic construct
  source 1..20: mol_type = other RNA
tagcacctctgggtctatgt

SEQ ID NO: 1269 - RNA, 20 nt, synthetic construct
  source 1..20: mol_type = other RNA
agcacctctgggtctatgtg

SEQ ID NO: 1270 - RNA, 20 nt, synthetic construct
  source 1..20: mol_type = other RNA
gtggccccacatagacccag

SEQ ID NO: 1271 - RNA, 20 nt, synthetic construct
  source 1..20: mol_type = other RNA
gtctatgtggggccacaccg

SEQ ID NO: 1272 - RNA, 20 nt, synthetic construct
  source 1..20: mol_type = other RNA
tctatgtggggccacaccgt

SEQ ID NO: 1273 - RNA, 20 nt, synthetic construct
  source 1..20: mol_type = other RNA
ctatgtggggccacaccgtg

SEQ ID NO: 1274 - RNA, 20 nt, synthetic construct
  source 1..20: mol_type = other RNA
tgtggggccacaccgtgggg

SEQ ID NO: 1275 - RNA, 20 nt, synthetic construct
  source 1..20: mol_type = other RNA
gctgtttcctccccacggtg

SEQ ID NO: 1276 - RNA, 20 nt, synthetic construct
  source 1..20: mol_type = other RNA
cgcgtgctgtttcctcccca

SEQ ID NO: 1277 - RNA, 20 nt, synthetic construct
  source 1..20: mol_type = other RNA
cgcgacgtttgtagaatgct

SEQ ID NO: 1278 - RNA, 20 nt, synthetic construct
  source 1..20: mol_type = other RNA
tgcttggctgtgatacaaag

SEQ ID NO: 1279 - RNA, 20 nt, synthetic construct
  source 1..20: mol_type = other RNA
cacagaaagatgtcaataac

SEQ ID NO: 1280 - RNA, 20 nt, synthetic construct
  source 1..20: mol_type = other RNA
acacagaaagatgtcaataa

SEQ ID NO: 1281 - RNA, 20 nt, synthetic construct
  source 1..20: mol_type = other RNA
tgacatctttctgtgtgcca

SEQ ID NO: 1282 - RNA, 20 nt, synthetic construct
  source 1..20: mol_type = other RNA
gcgcagctggagtgggggac

SEQ ID NO: 1283 - DNA, 1001 bp, Homo sapiens
  source 1..1001: mol_type = genomic DNA
tacccagagaatggagaaaccctgcagggaattcccaagctgtagttataaacagaagttctccttctgctaggtagcattcaaagatcttaatcttctgggtttccgttttctcgaatgaaaaatgcaggtccgagcagttaactggctggggcaccattagcaagtcacttagcatctctggggccagtctgcaaagcgagggggcagccttaatgtgcctccagcctgaagtcctagaatgagcgcccggtgtcccaagctggggcgcgcaccccagatcggagggcgccgatgtacagacagcaaactcacccagtctagtgcatgccttcttaaacatcacgagactctaagaaaaggaaactgaaaacgggaaagtccctctctctaacctggcactgcgtcgctggcttggagacaggtgacggtccctgcgggccttgtcctgattggctgggcacgcgtttaatataagtggaggcgtcgcgctggcgggcattcctgaagctgacagcattcgggccgagatgtctcgctccgtggccttagctgtgctcgcgctactctctctttctggcctggaggctatccagcgtgagtctctcctaccctcccgctctggtccttcctctcccgctctgcaccctctgtggccctcgctgtgctctctcgctccgtgacttcccttctccaagttctccttggtggcccgccgtggggctagtccagggctggatctcggggaagcggcggggtggcctgggagtggggaagggggtgcgcacccgggacgcgcgctacttgcccctttcggcggggagcaggggagacctttggcctacggcgacgggagggtcgggacaaagtttagggcgtcgataagcgtcagagcgccgaggttgggggagggtttctcttccgctctttcgcggggcctctggctcccccagcgcagctggagtgggggacgggtaggctcgtcccaaaggcgcggcgct

SEQ ID NO: 1284 - DNA, 2001 bp, Homo sapiens
  source 1..2001: mol_type = genomic DNA
gagccctttgtcttccagtgtctaaaatattaatgtcaatggaatcaggccagagtttgaattctagtctcttagcctttgtttcccctgtccataaaatgaatgggggtaattctttcctcctacagtttatttatatattcactaattcattcattcatccatccattcgttcattcggtttactgagtacctactatgtgccagcccctgttctagggtggaaactaagagaatgatgtacctagagggcgctggaagctctaaagccctagcagttactgcttttactattagtggtcgtttttttctcccccccgccccccgacaaatcaacagaacaaagaaaattacctaaacagcaaggacatagggaggaacttcttggcacagaactttccaaacactttttcctgaagggatacaagaagcaagaaaggtactctttcactaggaccttctctgagctgtcctcaggatgcttttgggactatttttcttacccagagaatggagaaaccctgcagggaattcccaagctgtagttataaacagaagttctccttctgctaggtagcattcaaagatcttaatcttctgggtttccgttttctcgaatgaaaaatgcaggtccgagcagttaactggctggggcaccattagcaagtcacttagcatctctggggccagtctgcaaagcgagggggcagccttaatgtgcctccagcctgaagtcctagaatgagcgcccggtgtcccaagctggggcgcgcaccccagatcggagggcgccgatgtacagacagcaaactcacccagtctagtgcatgccttcttaaacatcacgagactctaagaaaaggaaactgaaaacgggaaagtccctctctctaacctggcactgcgtcgctggcttggagacaggtgacggtccctgcgggccttgtcctgattggctgggcacgcgtttaatataagtggaggcgtcgcgctggcgggcattcctgaagctgacagcattcgggccgagatgtctcgctccgtggccttagctgtgctcgcgctactctctctttctggcctggaggctatccagcgtgagtctctcctaccctcccgctctggtccttcctctcccgctctgcaccctctgtggccctcgctgtgctctctcgctccgtgacttcccttctccaagttctccttggtggcccgccgtggggctagtccagggctggatctcggggaagcggcggggtggcctgggagtggggaagggggtgcgcacccgggacgcgcgctacttgcccctttcggcggggagcaggggagacctttggcctacggcgacgggagggtcgggacaaagtttagggcgtcgataagcgtcagagcgccgaggttgggggagggtttctcttccgctctttcgcggggcctctggctcccccagcgcagctggagtgggggacgggtaggctcgtcccaaaggcgcggcgctgaggtttgtgaacgcgtggaggggcgcttggggtctgggggaggcgtcgcccgggtaagcctgtctgctgcggctctgcttcccttagactggagagctgtggacttcgtctaggcgcccgctaagttcgcatgtcctagcacctctgggtctatgtggggccacaccgtggggaggaaacagcacgcgacgtttgtagaatgcttggctgtgatacaaagcggtttcgaataattaacttatttgttcccatcacatgtcacttttaaaaaattataagaactacccgttattgacatctttctgtgtgccaaggactttatgtgctttgcgtcatttaattttgaaaacagttatcttccgccatagataactactatggttatcttctgcctctcacagatgaagaaactaaggcaccgagattttaagaaacttaattacacaggggataaatggcagcaatcgagattgaagtcaagcctaaccagggcttttgc

SEQ ID NO: 1285 - protein, 150 aa, synthetic construct
  VARIANT 6..150: note = may be absent
GGGGSGGGGSGGGGSGGGGSGGGGSGGGGSGGGGSGGGGSGGGGSGGGGSGGGGSGGGGSGGGGSGGGGSGGGGSGGGGSGGGGSGGGGSGGGGSGGGGSGGGGSGGGGSGGGGSGGGGSGGGGSGGGGSGGGGSGGGGSGGGGSGGGGS

SEQ ID NO: 1286 - protein, 150 aa, synthetic construct
  VARIANT 6..150: note = may be absent
EAAAKEAAAKEAAAKEAAAKEAAAKEAAAKEAAAKEAAAKEAAAKEAAAKEAAAKEAAAKEAAAKEAAAKEAAAKEAAAKEAAAKEAAAKEAAAKEAAAKEAAAKEAAAKEAAAKEAAAKEAAAKEAAAKEAAAKEAAAKEAAAKEAAAK

SEQ ID NO: 1287 - protein, 120 aa, synthetic construct
  VARIANT 5..120: note = may be absent
SGGSSGGSSGGSSGGSSGGSSGGSSGGSSGGSSGGSSGGSSGGSSGGSSGGSSGGSSGGSSGGSSGGSSGGSSGGSSGGSSGGSSGGSSGGSSGGSSGGSSGGSSGGSSGGSSGGSSGGS

SEQ ID NO: 1288 - protein, 30 aa, synthetic construct
  VARIANT 2..30: note = may be absent
GGGGGGGGGGGGGGGGGGGGGGGGGGGGGG

SEQ ID NO: 1289 - protein, 60 aa, synthetic construct
  VARIANT 3..60: note = may be absent
XPXPXPXPXPXPXPXPXPXPXPXPXPXPXPXPXPXPXPXPXPXPXPXPXPXPXPXPXPXP

SEQ ID NO: 1290 - protein, 21 aa, synthetic construct
  VARIANT 4..21: note = may be absent
GGSGGSGGSGGSGGSGGSGGS

SEQ ID NO: 1291 - protein, 182 aa, synthetic construct
SRPGERPFQCRICMRNFSQSAHLKRHLRTHTGEKPFQCRICMRNFSLKHDLRRHLKTHTGGGGSQKPFQCRICMRNFSKRQYLQVHTRTHTGEKPFQCRICMRNFSDRANLRRHLRTHTGGGGSQKPFQCRICMRNFSRQDNLGRHLRTHTGEKPFQCRICMRNFSRRDHLPGHLKTHLRGS

SEQ ID NO: 1292 - protein, 179 aa, synthetic construct
SRPGERPFQCRICMRNFSRREHLVRHLRTHTGEKPFQCRICMRNFSHHNSLTRHLKTHTGSQKPFQCRICMRNFSRQDNLGRHLRTHTGEKPFQCRICMRNFSDKSVLARHLKTHTGGGGSQKPFQCRICMRNFSRADNLGRHLRTHTGEKPFQCRICMRNFSTNNWLNQHLKTHLRGS

SEQ ID NO: 1293 - protein, 179 aa, synthetic construct
SRPGERPFQCRICMRNFSRQDNLHTHLRTHTGEKPFQCRICMRNFSQGGTLRRHLKTHTGGGGSQKPFQCRICMRNFSDHSSLKRHLRTHTGEKPFQCRICMRNFSQSNTLRSHLKTHTGSQKPFQCRICMRNFSRVDHLHRHLRTHTGEKPFQCRICMRNFSRSHTLTSHLKTHLRGS

SEQ ID NO: 1294 - protein, 179 aa, synthetic construct
SRPGERPFQCRICMRNFSRREHLTIHLRTHTGEKPFQCRICMRNFSRLDMLARHLKTHTGGGGSQKPFQCRICMRNFSQQTNLTRHLRTHTGEKPFQCRICMRNFSVAHGLQAHLKTHTGSQKPFQCRICMRNFSHKSSLTRHLRTHTGEKPFQCRICMRNFSRPDNLPRHLKTHLRGS

SEQ ID NO: 1295 - protein, 179 aa, synthetic construct
SRPGERPFQCRICMRNFSRNRNLVLHTRTHTGEKPFQCRICMRNFSQSTTLKRHLRTHTGGGGSQKPFQCRICMRNFSQNANLARHLRTHTGEKPFQCRICMRNFSQKANLGVHLKTHTGSQKPFQCRICMRNFSTNSSLTRHLRTHTGEKPFQCRICMRNFSISHNLARHLKTHLRGS

SEQ ID NO: 1296 - protein, 179 aa, synthetic construct
SRPGERPFQCRICMRNFSRRAHLLSHTRTHTGEKPFQCRICMRNFSEAHHLSRHLRTHTGSQKPFQCRICMRNFSKNNDLTRHTRTHTGEKPFQCRICMRNFSRREHLVRHLRTHTGGGGSQKPFQCRICMRNFSRNFILQRHTRTHTGEKPFQCRICMRNFSQSAHLKRHLRTHLRGS

SEQ ID NO: 1297 - protein, 179 aa, synthetic construct
SRPGERPFQCRICMRNFSKRHTLTRHTRTHTGEKPFQCRICMRNFSRREHLVRHLRTHTGGGGSQKPFQCRICMRNFSRQHHLTYHTRTHTGEKPFQCRICMRNFSRTDTLARHLRTHTGSQKPFQCRICMRNFSGPTALRHHTRTHTGEKPFQCRICMRNFSRREVLENHLRTHLRGS

SEQ ID NO: 1298 - protein, 179 aa, synthetic construct
SRPGERPFQCRICMRNFSSPSKLVRHTRTHTGEKPFQCRICMRNFSRQDHLTNHLRTHTGSQKPFQCRICMRNFSRQHHLTYHTRTHTGEKPFQCRICMRNFSRTDTLARHLRTHTGGGGSQKPFQCRICMRNFSQQTNLTRHLRTHTGEKPFQCRICMRNFSQPHGLAHHLKTHLRGS

SEQ ID NO: 1299 - protein, 182 aa, synthetic construct
SRPGERPFQCRICMRNFSLSQTLKRHTRTHTGEKPFQCRICMRNFSRTDTLARHLRTHTGGGGSQKPFQCRICMRNFSRRRNLTLHTRTHTGEKPFQCRICMRNFSDRSSLKRHLRTHTGGGGSQKPFQCRICMRNFSDSSVLRRHLRTHTGEKPFQCRICMRNFSQGQNLTIHLKTHLRGS

SEQ ID NO: 1300 - protein, 182 aa, synthetic construct
SRPGERPFQCRICMRNFSTHAHLTRHTRTHTGEKPFQCRICMRNFSEKHDLKRHLRTHTGGGGSQKPFQCRICMRNFSKRQYLQVHTRTHTGEKPFQCRICMRNFSDRANLRRHLRTHTGGGGSQKPFQCRICMRNFSRQDNLGRHLRTHTGEKPFQCRICMRNFSRPESLRPHLKTHLRGS

SEQ ID NO: 1301 - protein, 179 aa, synthetic construct
SRPGERPFQCRICMRNFSRREHLVRHLRTHTGEKPFQCRICMRNFSINHSLRRHLKTHTGSQKPFQCRICMRNFSRQDNLGRHLRTHTGEKPFQCRICMRNFSDKSVLARHLKTHTGGGGSQKPFQCRICMRNFSRADNLGRHLRTHTGEKPFQCRICMRNFSTNNWLNQHLKTHLRGS

SEQ ID NO: 1302 - protein, 179 aa, synthetic construct; identical to SEQ ID NO: 1301

SEQ ID NO: 1303 - protein, 179 aa, synthetic construct
SRPGERPFQCRICMRNFSRQHHLTYHTRTHTGEKPFQCRICMRNFSRTDTLARHLRTHTGGGGSQKPFQCRICMRNFSQQTNLTRHLRTHTGEKPFQCRICMRNFSQPHGLAHHLKTHTGSQKPFQCRICMRNFSMTSSLRRHTRTHTGEKPFQCRICMRNFSRQDNLGRHLRTHLRGS

SEQ ID NO: 1304 - protein, 179 aa, synthetic construct
SRPGERPFQCRICMRNFSRNRNLVLHTRTHTGEKPFQCRICMRNFSQSTTLKRHLRTHTGGGGSQKPFQCRICMRNFSQQTNLTRHLRTHTGEKPFQCRICMRNFSQGGNLALHLKTHTGSQKPFQCRICMRNFSTNSSLTRHLRTHTGEKPFQCRICMRNFSVVSNLRRHLKTHLRGS

SEQ ID NO: 1305 - protein, 179 aa, synthetic construct
SRPGERPFQCRICMRNFSRRAHLLSHTRTHTGEKPFQCRICMRNFSEAHHLSRHLRTHTGSQKPFQCRICMRNFSRRHDLRRHTRTHTGEKPFQCRICMRNFSRQAHLQNHLRTHTGGGGSQKPFQCRICMRNFSTTYHLIRHTRTHTGEKPFQCRICMRNFSQSAHLKRHLRTHLRGS

SEQ ID NO: 1306 - protein, 179 aa, synthetic construct
SRPGERPFQCRICMRNFSKHHTLQRHTRTHTGEKPFQCRICMRNFSRREHLVRHLRTHTGGGGSQKPFQCRICMRNFSRQHHLTYHTRTHTGEKPFQCRICMRNFSRTDTLARHLRTHTGSQKPFQCRICMRNFSGHTALRHHTRTHTGEKPFQCRICMRNFSRREVLENHLRTHLRGS

SEQ ID NO: 1307 - protein, 179 aa, synthetic construct
SRPGERPFQCRICMRNFSSPSKLVRHTRTHTGEKPFQCRICMRNFSRQDHLTNHLRTHTGSQKPFQCRICMRNFSRQHHLTYHTRTHTGEKPFQCRICMRNFSRTDTLARHLRTHTGGGGSQKPFQCRICMRNFSLRANLQRHTRTHTGEKPFQCRICMRNFSQPHSLAVHLRTHLRGS

SEQ ID NO: 1308 - protein, 182 aa, synthetic construct
SRPGERPFQCRICMRNFSLSQTLKRHTRTHTGEKPFQCRICMRNFSRTDTLARHLRTHTGGGGSQKPFQCRICMRNFSRRRNLTLHTRTHTGEKPFQCRICMRNFSDRSSLKRHLRTHTGGGGSQKPFQCRICMRNFSDSSVLRRHLRTHTGEKPFQCRICMRNFSQSGNLHTHLKTHLRGS

SEQ ID NO: 1309 - protein, 182 aa, synthetic construct
SRPGERPFQCRICMRNFSTHAHLTRHTRTHTGEKPFQCRICMRNFSEKHDLKRHLRTHTGGGGSQKPFQCRICMRNFSKKQYLVCHTRTHTGEKPFQCRICMRNFSDSSNLTRHLRTHTGGGGSQKPFQCRICMRNFSRQDNLGRHLRTHTGEKPFQCRICMRNFSRRDHLPGHLKTHLRGS

SEQ ID NO: 1310 - protein, 179 aa, synthetic construct
SRPGERPFQCRICMRNFSRREHLVRHLRTHTGEKPFQCRICMRNFSINHSLRRHLKTHTGSQKPFQCRICMRNFSKKTNLTRHTRTHTGEKPFQCRICMRNFSESTTLKRHLRTHTGGGGSQKPFQCRICMRNFSRQDNLGRHLRTHTGEKPFQCRICMRNFSTNHWLLIHLKTHLRGS

SEQ ID NO: 1311 - protein, 179 aa, synthetic construct
SRPGERPFQCRICMRNFSRREHLTIHLRTHTGEKPFQCRICMRNFSRLDMLARHLKTHTGSQKPFQCRICMRNFSGPTALRHHTRTHTGEKPFQCRICMRNFSRREVLENHLRTHTGGGGSQKPFQCRICMRNFSHKSSLTRHLRTHTGEKPFQCRICMRNFSRIDNLIRHLKTHLRGS

SEQ ID NO: 1312 - protein, 179 aa, synthetic construct
SRPGERPFQCRICMRNFSRQHHLTYHTRTHTGEKPFQCRICMRNFSRTDTLARHLRTHTGGGGSQKPFQCRICMRNFSQQTNLTRHLRTHTGEKPFQCRICMRNFSVAHGLQAHLKTHTGSQKPFQCRICMRNFSHKSSLTRHLRTHTGEKPFQCRICMRNFSRPDNLPRHLKTHLRGS

SEQ ID NO: 1313 - protein, 179 aa, synthetic construct
SRPGERPFQCRICMRNFSRGRNLMLHTRTHTGEKPFQCRICMRNFSQSTTLKRHLRTHTGGGGSQKPFQCRICMRNFSQAGNLVRHLRTHTGEKPFQCRICMRNFSQKVNLGIHLKTHTGSQKPFQCRICMRNFSTNSSLTRHLRTHTGEKPFQCRICMRNFSVVSNLRRHLKTHLRGS

SEQ ID NO: 1314 - protein, 176 aa, synthetic construct
SRPGERPFQCRICMRNFSSPSKLVRHTRTHTGEKPFQCRICMRNFSRQDHLTNHLRTHTGSQKPFQCRICMRNFSRQHHLTYHTRTHTGEKPFQCRICMRNFSRTDTLARHLRTHTGSQKPFQCRICMRNFSGPTALRHHTRTHTGEKPFQCRICMRNFSRREVLENHLRTHLRGS

SEQ ID NO: 1315 - protein, 179 aa, synthetic construct
SRPGERPFQCRICMRNFSKRHTLTRHTRTHTGEKPFQCRICMRNFSRREHLVRHLRTHTGGGGSQKPFQCRICMRNFSRREHLTIHLRTHTGEKPFQCRICMRNFSRLDMLARHLKTHTGSQKPFQCRICMRNFSGPTALRHHTRTHTGEKPFQCRICMRNFSRREVLENHLRTHLRGS

SEQ ID NO: 1316 - protein, 179 aa, synthetic construct
SRPGERPFQCRICMRNFSSPSKLVRHTRTHTGEKPFQCRICMRNFSRQDHLTNHLRTHTGSQKPFQCRICMRNFSRREHLTIHLRTHTGEKPFQCRICMRNFSRTDLLGRHLKTHTGGGGSQKPFQCRICMRNFSQQTNLTRHLRTHTGEKPFQCRICMRNFSQPHGLAHHLKTHLRGS

SEQ ID NO: 1317 - protein, 182 aa, synthetic construct
SRPGERPFQCRICMRNFSLSQTLKRHTRTHTGEKPFQCRICMRNFSRTDTLARHLRTHTGGGGSQKPFQCRICMRNFSRRRNLQLHTRTHTGEKPFQCRICMRNFSDHSSLKRHLRTHTGGGGSQKPFQCRICMRNFSDSSVLRRHLRTHTGEKPFQCRICMRNFSQGQNLTIHLKTHLRGS

SEQ ID NO: 1318 - protein, 182 aa, synthetic construct
SRPGERPFQCRICMRNFSTHAHLTRHTRTHTGEKPFQCRICMRNFSEKHDLKRHLRTHTGGGGSQKPFQCRICMRNFSKKQYLVCHTRTHTGEKPFQCRICMRNFSDQTNLRRHLRTHTGGGGSQKPFQCRICMRNFSRQDNLGRHLRTHTGEKPFQCRICMRNFSRPESLRPHLKTHLRGS

SEQ ID NO: 1319 - protein, 179 aa, synthetic construct
SRPGERPFQCRICMRNFSRREHLVRHLRTHTGEKPFQCRICMRNFSINHSLRRHLKTHTGSQKPFQCRICMRNFSKKTNLTRHTRTHTGEKPFQCRICMRNFSESTTLKRHLRTHTGGGGSQKPFQCRICMRNFSRADNLGRHLRTHTGEKPFQCRICMRNFSTKQWTLGHLKTHLRGS

SEQ ID NO: 1320 - protein, 179 aa, synthetic construct
SRPGERPFQCRICMRNFSKKCHLVTHTRTHTGEKPFQCRICMRNFSRRDILGRHLRTHTGSQKPFQCRICMRNFSGHTALRHHTRTHTGEKPFQCRICMRNFSRREVLENHLRTHTGGGGSQKPFQCRICMRNFSHKSSLTRHLRTHTGEKPFQCRICMRNFSRIDNLIRHLKTHLRGS

SEQ ID NO: 1321 - protein, 179 aa, synthetic construct
SRPGERPFQCRICMRNFSRQHHLTYHTRTHTGEKPFQCRICMRNFSRTDTLARHLRTHTGGGGSQKPFQCRICMRNFSQQTNLTRHLRTHTGEKPFQCRICMRNFSQPHGLAHHLKTHTGSQKPFQCRICMRNFSHKSSLTRHLRTHTGEKPFQCRICMRNFSRPDNLPRHLKTHLRGS

SEQ ID NO: 1322 - protein, 179 aa, synthetic construct
SRPGERPFQCRICMRNFSRARNLTLHTRTHTGEKPFQCRICMRNFSQSTTLKRHLRTHTGGGGSQKPFQCRICMRNFSQQTNLTRHLRTHTGEKPFQCRICMRNFSQGGNLALHLKTHTGSQKPFQCRICMRNFSHESSLRRHLRTHTGEKPFQCRICMRNFSISHNLARHLKTHLRGS

SEQ ID NO: 1323 - protein, 176 aa, synthetic construct
SRPGERPFQCRICMRNFSVPSKLLRHTRTHTGEKPFQCRICMRNFSRQDHLTNHLRTHTGSQKPFQCRICMRNFSRREHLTIHLRTHTGEKPFQCRICMRNFSRLDMLARHLKTHTGSQKPFQCRICMRNFSGHTALRHHTRTHTGEKPFQCRICMRNFSRREVLENHLRTHLRGS

SEQ ID NO: 1324 - protein, 179 aa, synthetic construct
SRPGERPFQCRICMRNFSRTNDLARHTRTHTGEKPFQCRICMRNFSRREHLVRHLRTHTGGGGSQKPFQCRICMRNFSRQHHLTYHTRTHTGEKPFQCRICMRNFSRTDTLARHLRTHTGSQKPFQCRICMRNFSGHTALRHHTRTHTGEKPFQCRICMRNFSRREVLENHLRTHLRGS

SEQ ID NO: 1325 - protein, 179 aa, synthetic construct
SRPGERPFQCRICMRNFSSPSKLVRHTRTHTGEKPFQCRICMRNFSRQDHLTNHLRTHTGSQKPFQCRICMRNFSRQHHLTYHTRTHTGEKPFQCRICMRNFSRTDTLARHLRTHTGGGGSQKPFQCRICMRNFSQQTNLTRHLRTHTGEKPFQCRICMRNFSVAHGLQAHLKTHLRGS

SEQ ID NO: 1326 - protein, 182 aa, synthetic construct
SRPGERPFQCRICMRNFSLSQTLKRHLRTHTGEKPFQCRICMRNFSRLDMLARHLKTHTGGGGSQKPFQCRICMRNFSRRRNLTLHTRTHTGEKPFQCRICMRNFSDRSSLKRHLRTHTGGGGSQKPFQCRICMRNFSDSSVLRRHLRTHTGEKPFQCRICMRNFSQGQNLTIHLKTHLRGS

SEQ ID NO: 1327 - protein, 182 aa, synthetic construct
SRPGERPFQCRICMRNFSQSAHLKRHLRTHTGEKPFQCRICMRNFSLKHDLRRHLKTHTGGGGSQKPFQCRICMRNFSKKQYLVCHTRTHTGEKPFQCRICMRNFSDQTNLRRHLRTHTGGGGSQKPFQCRICMRNFSRQDNLGRHLRTHTGEKPFQCRICMRNFSRRDHLPGHLKTHLRGS

SEQ ID NO: 1328 - protein, 179 aa, synthetic construct
SRPGERPFQCRICMRNFSRREHLVRHLRTHTGEKPFQCRICMRNFSVNSSLGRHLKTHTGSQKPFQCRICMRNFSRQDNLGRHLRTHTGEKPFQCRICMRNFSDKSVLARHLKTHTGGGGSQKPFQCRICMRNFSRADNLGRHLRTHTGEKPFQCRICMRNFSTNNWLNQHLKTHLRGS

SEQ ID NO: 1329 - protein, 179 aa, synthetic construct
SRPGERPFQCRICMRNFSKKCHLVTHTRTHTGEKPFQCRICMRNFSRRDILGRHLRTHTGSQKPFQCRICMRNFSGPTALRHHTRTHTGEKPFQCRICMRNFSRREVLENHLRTHTGGGGSQKPFQCRICMRNFSHKSSLTRHLRTHTGEKPFQCRICMRNFSRPDNLPRHLKTHLRGS

SEQ ID NO: 1330 - protein, 179 aa, synthetic construct
SRPGERPFQCRICMRNFSKKCHLVTHTRTHTGEKPFQCRICMRNFSRRDILGRHLRTHTGGGGSQKPFQCRICMRNFSQQTNLTRHLRTHTGEKPFQCRICMRNFSQPHGLAHHLKTHTGSQKPFQCRICMRNFSHKSSLTRHLRTHTGEKPFQCRICMRNFSRPDNLPRHLKTHLRGS

SEQ ID NO: 1331 - protein, 179 aa, synthetic construct
SRPGERPFQCRICMRNFSDPSTLRRHTRTHTGEKPFQCRICMRNFSQSTTLKRHLRTHTGSQKPFQCRICMRNFSKKDHLHRHTRTHTGEKPFQCRICMRNFSRQDNLGRHLRTHTGGGGSQKPFQCRICMRNFSRQDNLHTHLRTHTGEKPFQCRICMRNFSQGGTLRRHLKTHLRGS

SEQ ID NO: 1332 - protein, 176 aa, synthetic construct
SRPGERPFQCRICMRNFSVPSKLLRHTRTHTGEKPFQCRICMRNFSRQDHLTNHLRTHTGSQKPFQCRICMRNFSRREHLTIHLRTHTGEKPFQCRICMRNFSRLDMLARHLKTHTGSQKPFQCRICMRNFSGPTALRHHTRTHTGEKPFQCRICMRNFSRREVLENHLRTHLRGS

SEQ ID NO: 1333 - protein, 179 aa, synthetic construct
SRPGERPFQCRICMRNFSKHHTLQRHTRTHTGEKPFQCRICMRNFSRREHLVRHLRTHTGGGGSQKPFQCRICMRNFSRREHLTIHLRTHTGEKPFQCRICMRNFSRTDLLGRHLKTHTGSQKPFQCRICMRNFSGPTALRHHTRTHTGEKPFQCRICMRNFSRREVLENHLRTHLRGS

SEQ ID NO: 1334 - protein, 179 aa, synthetic construct
SRPGERPFQCRICMRNFSSPSKLVRHTRTHTGEKPFQCRICMRNFSRKDHLTTHLRTHTGSQKPFQCRICMRNFSRREHLTIHLRTHTGEKPFQCRICMRNFSRTDLLGRHLKTHTGGGGSQKPFQCRICMRNFSQQTNLTRHLRTHTGEKPFQCRICMRNFSVAHGLQAHLKTHLRGS

SEQ ID NO: 1335 - protein, 182 aa, synthetic construct
SRPGERPFQCRICMRNFSLSQTLKRHLRTHTGEKPFQCRICMRNFSRLDMLARHLKTHTGGGGSQKPFQCRICMRNFSRRRNLTLHTRTHTGEKPFQCRICMRNFSDRSSLKRHLRTHTGGGGSQKPFQCRICMRNFSDSSVLRRHLRTHTGEKPFQCRICMRNFSQSGNLHTHLKTHLRGS

SEQ ID NO: 1336 - protein, 182 aa, synthetic construct
SRPGERPFQCRICMRNFSQSAHLKRHLRTHTGEKPFQCRICMRNFSLKHDLRRHLKTHTGGGGSQKPFQCRICMRNFSKKQYLVCHTRTHTGEKPFQCRICMRNFSDSSNLTRHLRTHTGGGGSQKPFQCRICMRNFSRQDNLGRHLRTHTGEKPFQCRICMRNFSRPESLRPHLKTHLRGS

SEQ ID NO: 1337 - protein, 179 aa, synthetic construct
SRPGERPFQCRICMRNFSRREHLVRHLRTHTGEKPFQCRICMRNFSINHSLRRHLKTHTGSQKPFQCRICMRNFSKKTNLTRHTRTHTGEKPFQCRICMRNFSDRSVLRRHLRTHTGGGGSQKPFQCRICMRNFSRADNLGRHLRTHTGEKPFQCRICMRNFSTKQWTLGHLKTHLRGS

SEQ ID NO: 1338 - protein, 179 aa, synthetic construct
SRPGERPFQCRICMRNFSRQHHLTYHTRTHTGEKPFQCRICMRNFSRTDTLARHLRTHTGSQKPFQCRICMRNFSGPTALRHHTRTHTGEKPFQCRICMRNFSRREVLENHLRTHTGGGGSQKPFQCRICMRNFSHKSSLTRHLRTHTGEKPFQCRICMRNFSRPDNLPRHLKTHLRGS

SEQ ID NO: 1339 - protein, 179 aa, synthetic construct
SRPGERPFQCRICMRNFSRGRNLMLHTRTHTGEKPFQCRICMRNFSQSTTLKRHLRTHTGGGGSQKPFQCRICMRNFSQAGNLVRHLRTHTGEKPFQCRICMRNFSQKVNLGIHLKTHTGSQKPFQCRICMRNFSHESSLRRHLRTHTGEKPFQCRICMRNFSISHNLARHLKTHLRGS

SEQ ID NO: 1340 - protein, 179 aa, synthetic construct
SRPGERPFQCRICMRNFSDPSTLRRHTRTHTGEKPFQCRICMRNFSQSTTLKRHLRTHTGSQKPFQCRICMRNFSRNTHLARHTRTHTGEKPFQCRICMRNFSRQDNLGRHLRTHTGGGGSQKPFQCRICMRNFSRQDNLHTHLRTHTGEKPFQCRICMRNFSQGGTLRRHLKTHLRGS

SEQ ID NO: 1341 - protein, 176 aa, synthetic construct
SRPGERPFQCRICMRNFSVPSKLLRHTRTHTGEKPFQCRICMRNFSRQDHLTNHLRTHTGSQKPFQCRICMRNFSRQHHLTYHTRTHTGEKPFQCRICMRNFSRTDTLARHLRTHTGSQKPFQCRICMRNFSGHTALRHHTRTHTGEKPFQCRICMRNFSRREVLENHLRTHLRGS

SEQ ID NO: 1342 - protein, 179 aa, synthetic construct
SRPGERPFQCRICMRNFSKHHTLQRHTRTHTGEKPFQCRICMRNFSRREHLVRHLRTHTGGGGSQKPFQCRICMRNFSRREHLTIHLRTHTGEKPFQCRICMRNFSRTDLLGRHLKTHTGSQKPFQCRICMRNFSGHTALRHHTRTHTGEKPFQCRICMRNFSRREVLENHLRTHLRGS

SEQ ID NO: 1343 - protein, 179 aa, synthetic construct
SRPGERPFQCRICMRNFSSPSKLVRHTRTHTGEKPFQCRICMRNFSRQDHLTNHLRTHTGSQKPFQCRICMRNFSRREHLTIHLRTHTGEKPFQCRICMRNFSRTDLLGRHLKTHTGGGGSQKPFQCRICMRNFSLRANLQRHTRTHTGEKPFQCRICMRNFSQPHSLAVHLRTHLRGS

SEQ ID NO: 1344 - protein, 182 aa, synthetic construct
SRPGERPFQCRICMRNFSQSAHLKRHLRTHTGEKPFQCRICMRNFSLKHDLRRHLKTHTGGGGSQKPFQCRICMRNFSKRQYLQVHTRTHTGEKPFQCRICMRNFSDRANLRRHLRTHTGGGGSQKPFQCRICMRNFSRQDNLGRHLRTHTGEKPFQCRICMRNFSRPESLRPHLKTHLRGS

SEQ ID NO: 1345 - protein, 179 aa, synthetic construct
SRPGERPFQCRICMRNFSRREHLVRHLRTHTGEKPFQCRICMRNFSHHNSLTRHLKTHTGSQKPFQCRICMRNFSKKTNLTRHTRTHTGEKPFQCRICMRNFSESTTLKRHLRTHTGGGGSQKPFQCRICMRNFSRADNLGRHLRTHTGEKPFQCRICMRNFSTKQWTLGHLKTHLRGS

SEQ ID NO: 1346 - protein, 179 aa, synthetic construct
SRPGERPFQCRICMRNFSRQDNLHTHLRTHTGEKPFQCRICMRNFSQGGTLRRHLKTHTGGGGSQKPFQCRICMRNFSDHSSLKRHLRTHTGEKPFQCRICMRNFSQSNSLNAHLKTHTGSQKPFQCRICMRNFSRVDHLHRHLRTHTGEKPFQCRICMRNFSRSHTLTSHLKTHLRGS

SEQ ID NO: 1347 - protein, 179 aa, synthetic construct
SRPGERPFQCRICMRNFSRQHHLTYHTRTHTGEKPFQCRICMRNFSRTDTLARHLRTHTGSQKPFQCRICMRNFSGHTALRHHTRTHTGEKPFQCRICMRNFSRREVLENHLRTHTGGGGSQKPFQCRICMRNFSHKSSLTRHLRTHTGEKPFQCRICMRNFSRIDNLIRHLKTHLRGS

SEQ ID NO: 1348 - protein, 179 aa, synthetic construct
SRPGERPFQCRICMRNFSRARNLTLHTRTHTGEKPFQCRICMRNFSQSTTLKRHLRTHTGGGGSQKPFQCRICMRNFSQAGNLVRHLRTHTGEKPFQCRICMRNFSQKVNLGIHLKTHTGSQKPFQCRICMRNFSTNSSLTRHLRTHTGEKPFQCRICMRNFSVVSNLRRHLKTHLRGS

SEQ ID NO: 1349 - protein, 179 aa, synthetic construct
SRPGERPFQCRICMRNFSDPSTLRRHTRTHTGEKPFQCRICMRNFSQSTTLKRHLRTHTGSQKPFQCRICMRNFSRREHLVRHLRTHTGEKPFQCRICMRNFSRRDNLNRHLKTHTGGGGSQKPFQCRICMRNFSRQDNLHTHLRTHTGEKPFQCRICMRNFSQGGTLRRHLKTHLRGS

SEQ ID NO: 1350 - protein, 176 aa, synthetic construct
SRPGERPFQCRICMRNFSSPSKLVRHTRTHTGEKPFQCRICMRNFSRKDHLTTHLRTHTGSQKPFQCRICMRNFSRREHLTIHLRTHTGEKPFQCRICMRNFSRLDMLARHLKTHTGSQKPFQCRICMRNFSGPTALRHHTRTHTGEKPFQCRICMRNFSRREVLENHLRTHLRGS

SEQ ID NO: 1351 - protein, 179 aa, synthetic construct
SRPGERPFQCRICMRNFSSPSKLVRHTRTHTGEKPFQCRICMRNFSRQDHLTNHLRTHTGSQKPFQCRICMRNFSRREHLTIHLRTHTGEKPFQCRICMRNFSRLDMLARHLKTHTGGGGSQKPFQCRICMRNFSQQTNLTRHLRTHTGEKPFQCRICMRNFSVAHGLQAHLKTHLRGS

SEQ ID NO: 1352 - protein, 182 aa, synthetic construct
SRPGERPFQCRICMRNFSQQAHLVRHTRTHTGEKPFQCRICMRNFSVHESLKRHLRTHTGGGGSQKPFQCRICMRNFSKRQYLQVHTRTHTGEKPFQCRICMRNFSDRANLRRHLRTHTGGGGSQKPFQCRICMRNFSRQDNLGRHLRTHTGEKPFQCRICMRNFSRPESLRPHLKTHLRGS

SEQ ID NO: 1353 - protein, 179 aa, synthetic construct
SRPGERPFQCRICMRNFSRREHLVRHLRTHTGEKPFQCRICMRNFSVNSSLGRHLKTHTGSQKPFQCRICMRNFSKKTNLTRHTRTHTGEKPFQCRICMRNFSDRSVLRRHLRTHTGGGGSQKPFQCRICMRNFSRQDNLGRHLRTHTGEKPFQCRICMRNFSTNHWLLIHLKTHLRGS

SEQ ID NO: 1354 - protein, 179 aa, synthetic construct
SRPGERPFQCRICMRNFSRQDNLHTHLRTHTGEKPFQCRICMRNFSQGGTLRRHLKTHTGGGGSQKPFQCRICMRNFSDHSSLKRHLRTHTGEKPFQCRICMRNFSQSNSLNAHLKTHTGSQKPFQCRICMRNFSRVDHLHRHLRTHTGEKPFQCRICMRNFSRRYSLNNHLKTHLRGS

SEQ ID NO: 1355 - protein, 179 aa, synthetic construct
SRPGERPFQCRICMRNFSRREHLTIHLRTHTGEKPFQCRICMRNFSRLDMLARHLKTHTGSQKPFQCRICMRNFSGHTALRHHTRTHTGEKPFQCRICMRNFSRREVLENHLRTHTGGGGSQKPFQCRICMRNFSHKSSLTRHLRTHTGEKPFQCRICMRNFSRPDNLPRHLKTHLRGS

SEQ ID NO: 1356 - protein, 179 aa, synthetic construct
SRPGERPFQCRICMRNFSRGRNLMLHTRTHTGEKPFQCRICMRNFSQSTTLKRHLRTHTGGGGSQKPFQCRICMRNFSQAGNLVRHLRTHTGEKPFQCRICMRNFSQKVNLGIHLKTHTGSQKPFQCRICMRNFSTNSSLTRHLRTHTGEKPFQCRICMRNFSISHNLARHLKTHLRGS

SEQ ID NO: 1357 - protein, 179 aa, synthetic construct
SRPGERPFQCRICMRNFSRRAHLLSHTRTHTGEKPFQCRICMRNFSEAHHLSRHLRTHTGSQKPFQCRICMRNFSKGNDLTRHTRTHTGEKPFQCRICMRNFSRREHLVRHLRTHTGGGGSQKPFQCRICMRNFSRREVLENHLRTHTGEKPFQCRICMRNFSQSAHLGRHLKTHLRGS

SEQ ID NO: 1358 - protein, 176 aa, synthetic construct
SRPGERPFQCRICMRNFSVPSKLLRHTRTHTGEKPFQCRICMRNFSRQDHLTNHLRTHTGSQKPFQCRICMRNFSRREHLTIHLRTHTGEKPFQCRICMRNFSRTDLLGRHLKTHTGSQKPFQCRICMRNFSGPTALRHHTRTHTGEKPFQCRICMRNFSRREVLENHLRTHLRGS

SEQ ID NO: 1359 - protein, 179 aa, synthetic construct
SRPGERPFQCRICMRNFSSPSKLVRHTRTHTGEKPFQCRICMRNFSRQDHLTNHLRTHTGSQKPFQCRICMRNFSRREHLTIHLRTHTGEKPFQCRICMRNFSRLDMLARHLKTHTGGGGSQKPFQCRICMRNFSQQTNLTRHLRTHTGEKPFQCRICMRNFSQPHGLAHHLKTHLRGS

SEQ ID NO: 1360 - protein, 179 aa, synthetic construct
SRPGERPFQCRICMRNFSSPSKLARHTRTHTGEKPFQCRICMRNFSRKDNLACHLRTHTGGGGSQKPFQCRICMRNFSLREPLDRHTRTHTGEKPFQCRICMRNFSDSSVLRRHLRTHTGSQKPFQCRICMRNFSQKENLKSHLRTHTGEKPFQCRICMRNFSMNHHLKAHLKTHLRGS

SEQ ID NO: 1361 - protein, 179 aa, synthetic construct
SRPGERPFQCRICMRNFSTSSKLLRHTRTHTGEKPFQCRICMRNFSRKDNLMTHLRTHTGGGGSQKPFQCRICMRNFSLREPLDRHTRTHTGEKPFQCRICMRNFSDSSVLRRHLRTHTGSQKPFQCRICMRNFSQKENLKSHLRTHTGEKPFQCRICMRNFSQTHHLKSHLKTHLRGS

SEQ ID NO: 1362 - protein, 179 aa, synthetic construct
SRPGERPFQCRICMRNFSTSSKLLRHTRTHTGEKPFQCRICMRNFSRKDNLMTHLRTHTGGGGSQKPFQCRICMRNFSLREPLDRHTRTHTGEKPFQCRICMRNFSDSSVLRRHLRTHTGSQKPFQCRICMRNFSQKCNLQAHLRTHTGEKPFQCRICMRNFSMNHHLKAHLKTHLRGS

SEQ ID NO: 1363 - protein, 179 aa, synthetic construct
SRPGERPFQCRICMRNFSHRTNLIAHTRTHTGEKPFQCRICMRNFSRREHLVRHLRTHTGSQKPFQCRICMRNFSVRHNLTRHLRTHTGEKPFQCRICMRNFSQPHGLAHHLKTHTGGGGSQKPFQCRICMRNFSDESNLRRHTRTHTGEKPFQCRICMRNFSQKHHLVTHLRTHLRGS

SEQ ID NO: 1364 - protein, 179 aa, synthetic construct
SRPGERPFQCRICMRNFSHRTNLIAHTRTHTGEKPFQCRICMRNFSRREHLVRHLRTHTGSQKPFQCRICMRNFSVRHNLTRHLRTHTGEKPFQCRICMRNFSQRHGLSSHLKTHTGGGGSQKPFQCRICMRNFSDESNLRRHTRTHTGEKPFQCRICMRNFSQKHHLVTHLRTHLRGS

SEQ ID NO: 1365 - protein, 182 aa, synthetic construct
SRPGERPFQCRICMRNFSQSAHLKRHLRTHTGEKPFQCRICMRNFSRLDMLARHLKTHTGGGGSQKPFQCRICMRNFSKKCNLLSHTRTHTGEKPFQCRICMRNFSERGNLARHLRTHTGGGGSQKPFQCRICMRNFSQGANLSRHLRTHTGEKPFQCRICMRNFSRRDNLLRHLKTHLRGS

SEQ ID NO: 1366 - protein, 182 aa, synthetic construct
SRPGERPFQCRICMRNFSQRPHLTNHLRTHTGEKPFQCRICMRNFSRNDLLKRHLKTHTGGGGSQKPFQCRICMRNFSKKCNLLSHTRTHTGEKPFQCRICMRNFSERGNLARHLRTHTGGGGSQKPFQCRICMRNFSQQTNLTRHLRTHTGEKPFQCRICMRNFSRVDNLPRHLKTHLRGS

SEQ ID NO: 1367 - protein, 179 aa, synthetic construct
SRPGERPFQCRICMRNFSSPSKLVRHTRTHTGEKPFQCRICMRNFSRNDNLQTHLRTHTGGGGSQKPFQCRICMRNFSLREPLDRHTRTHTGEKPFQCRICMRNFSDSSVLRRHLRTHTGSQKPFQCRICMRNFSQKENLKSHLRTHTGEKPFQCRICMRNFSQTHHLKSHLKTHLRGS

SEQ ID NO: 1368 - protein, 179 aa, synthetic construct
SRPGERPFQCRICMRNFSKGNDLTRHTRTHTGEKPFQCRICMRNFSRREHLVRHLRTHTGGGGSQKPFQCRICMRNFSRNFILQRHTRTHTGEKPFQCRICMRNFSQSAHLKRHLRTHTGSQKPFQCRICMRNFSQRSDLTRHLRTHTGEKPFQCRICMRNFSQGGTLRRHLKTHLRGS

SEQ ID NO: 1369 - protein, 179 aa, synthetic construct
SRPGERPFQCRICMRNFSLKKDLLRHTRTHTGEKPFQCRICMRNFSRQDNLGRHLRTHTGGGGSQKPFQCRICMRNFSDGSTLNRHTRTHTGEKPFQCRICMRNFSQSAHLKRHLRTHTGSQKPFQCRICMRNFSKKDHLHRHTRTHTGEKPFQCRICMRNFSLSQTLKRHLRTHLRGS

SEQ ID NO: 1370 - protein, 179 aa, synthetic construct
SRPGERPFQCRICMRNFSDSGHLKRHLRTHTGEKPFQCRICMRNFSIRHHLKRHLKTHTGGGGSQKPFQCRICMRNFSRRDDLTRHLRTHTGEKPFQCRICMRNFSRLDMLARHLKTHTGSQKPFQCRICMRNFSTTTNLRRHTRTHTGEKPFQCRICMRNFSRREHLVRHLRTHLRGS

SEQ ID NO: 1371 - protein, 179 aa, synthetic construct
SRPGERPFQCRICMRNFSRKQHLTLHTRTHTGEKPFQCRICMRNFSDTSVLNRHLRTHTGSQKPFQCRICMRNFSSNLSLKRHTRTHTGEKPFQCRICMRNFSRPEHLLIHLRTHTGGGGSQKPFQCRICMRNFSDSPTLRRHTRTHTGEKPFQCRICMRNFSDREVLRRHLRTHLRGS

SEQ ID NO: 1372 - protein, 179 aa, synthetic construct
SRPGERPFQCRICMRNFSKQHDLVVHTRTHTGEKPFQCRICMRNFSDHSSLKRHLRTHTGGGGSQKPFQCRICMRNFSTHAHLTRHTRTHTGEKPFQCRICMRNFSRQDNLHTHLRTHTGSQKPFQCRICMRNFSTNNNLARHTRTHTGEKPFQCRICMRNFSRTDSLTLHLRTHLRGS

SEQ ID NO: 1373 - protein, 176 aa, synthetic construct
SRPGERPFQCRICMRNFSRRAHLLSHTRTHTGEKPFQCRICMRNFSEAHHLSRHLRTHTGSQKPFQCRICMRNFSKNNDLTRHTRTHTGEKPFQCRICMRNFSRREHLVRHLRTHTGSQKPFQCRICMRNFSRREHLTIHLRTHTGEKPFQCRICMRNFSRQDNLQRHLKTHLRGS

SEQ ID NO: 1374 - protein, 176 aa, synthetic construct
SRPGERPFQCRICMRNFSKGNDLTRHTRTHTGEKPFQCRICMRNFSRREHLVRHLRTHTGSQKPFQCRICMRNFSLNKTLQEHTRTHTGEKPFQCRICMRNFSQSTTLKRHLRTHTGSQKPFQCRICMRNFSRRRNLTLHTRTHTGEKPFQCRICMRNFSRREHLVRHLRTHLRGS

SEQ ID NO: 1375 - protein, 182 aa, synthetic construct
SRPGERPFQCRICMRNFSKRHTLTRHTRTHTGEKPFQCRICMRNFSQRSSLVRHLRTHTGGGGSQKPFQCRICMRNFSQSGTLHRHLRTHTGEKPFQCRICMRNFSRTEHLARHLKTHTGGGGSQKPFQCRICMRNFSQRGNLLRHLRTHTGEKPFQCRICMRNFSDQTTLRRHLKTHLRGS

SEQ ID NO: 1376 - protein, 176 aa, synthetic construct
SRPGERPFQCRICMRNFSRQEHLVRHLRTHTGEKPFQCRICMRNFSDPTSLNRHLKTHTGSQKPFQCRICMRNFSRNIHLQTHTRTHTGEKPFQCRICMRNFSRNEHLANHLRTHTGSQKPFQCRICMRNFSEASNLRRHTRTHTGEKPFQCRICMRNFSLKEHLTRHLRTHLRGS

SEQ ID NO: 1377 - protein, 179 aa, synthetic construct
SRPGERPFQCRICMRNFSDSGHLKRHLRTHTGEKPFQCRICMRNFSIRHHLKRHLKTHTGGGGSQKPFQCRICMRNFSRTDTLARHLRTHTGEKPFQCRICMRNFSRLDMLARHLKTHTGSQKPFQCRICMRNFSQTQNLTRHLRTHTGEKPFQCRICMRNFSRTEHLARHLKTHLRGS

SEQ ID NO: 1378 - protein, 176 aa, synthetic construct
SRPGERPFQCRICMRNFSRGSHLQQHTRTHTGEKPFQCRICMRNFSQSGHLKAHLRTHTGSQKPFQCRICMRNFSTRSKLDRHTRTHTGEKPFQCRICMRNFSQRSSLVRHLRTHTGSQKPFQCRICMRNFSDSSVLRRHLRTHTGEKPFQCRICMRNFSEGGALRRHLKTHLRGS

SEQ ID NO: 1379 - protein, 176 aa, synthetic construct
SRPGERPFQCRICMRNFSQSPHLKRHLRTHTGEKPFQCRICMRNFSRTEHLARHLKTHTGSQKPFQCRICMRNFSTNSSLTRHLRTHTGEKPFQCRICMRNFSREDNLGRHLKTHTGSQKPFQCRICMRNFSSDRRDLDHTRTHTGEKPFQCRICMRNFSSFQSYLEHLRTHLRGS

SEQ ID NO: 1380 - protein, 179 aa, synthetic construct
SRPGERPFQCRICMRNFSVPSKLLRHTRTHTGEKPFQCRICMRNFSQRSSLVRHLRTHTGGGGSQKPFQCRICMRNFSKGNDLTRHTRTHTGEKPFQCRICMRNFSRREHLVRHLRTHTGSQKPFQCRICMRNFSRAEHLAIHLRTHTGEKPFQCRICMRNFSRRDNLNRHLKTHLRGS

SEQ ID NO: 1381 - protein, 176 aa, synthetic construct
SRPGERPFQCRICMRNFSKNNDLTRHTRTHTGEKPFQCRICMRNFSRREHLVRHLRTHTGSQKPFQCRICMRNFSLKKTLKEHTRTHTGEKPFQCRICMRNFSQSTTLKRHLRTHTGSQKPFQCRICMRNFSRRRNLTLHTRTHTGEKPFQCRICMRNFSRREHLVRHLRTHLRGS

SEQ ID NO: 1382 - protein, 182 aa, synthetic construct
SRPGERPFQCRICMRNFSRNHTLTRHTRTHTGEKPFQCRICMRNFSQRSSLVRHLRTHTGGGGSQKPFQCRICMRNFSQSGTLHRHLRTHTGEKPFQCRICMRNFSRTEHLARHLKTHTGGGGSQKPFQCRICMRNFSQRGNLLRHLRTHTGEKPFQCRICMRNFSDQTTLRRHLKTHLRGS

SEQ ID NO: 1383 - protein, 176 aa, synthetic construct
SRPGERPFQCRICMRNFSRGEHLTRHLRTHTGEKPFQCRICMRNFSEPTSLIRHLKTHTGSQKPFQCRICMRNFSRNIHLQTHTRTHTGEKPFQCRICMRNFSRNEHLANHLRTHTGSQKPFQCRICMRNFSEASNLRRHTRTHTGEKPFQCRICMRNFSLKEHLTRHLRTHLRGS

SEQ ID NO: 1384 - protein, 179 aa, synthetic construct
SRPGERPFQCRICMRNFSTNSKLTRHTRTHTGEKPFQCRICMRNFSEAHHLSRHLRTHTGGGGSQKPFQCRICMRNFSRRDDLTRHLRTHTGEKPFQCRICMRNFSRLDMLARHLKTHTGSQKPFQCRICMRNFSQTQNLTRHLRTHTGEKPFQCRICMRNFSRTEHLARHLKTHLRGS

SEQ ID NO: 1385 - protein, 176 aa, synthetic construct
SRPGERPFQCRICMRNFSRGSHLQQHTRTHTGEKPFQCRICMRNFSQSGHLKAHLRTHTGSQKPFQCRICMRNFSLKEHLTRHLRTHTGEKPFQCRICMRNFSQTQSLQRHLKTHTGSQKPFQCRICMRNFSDSPTLRRHTRTHTGEKPFQCRICMRNFSDHSSLKRHLRTHLRGS

SEQ ID NO: 1386 - protein, 179 aa, synthetic construct
SRPGERPFQCRICMRNFSRADNLGRHLRTHTGEKPFQCRICMRNFSRMEHLPRHLKTHTGGGGSQKPFQCRICMRNFSHKSSLTRHLRTHTGEKPFQCRICMRNFSRPDNLPRHLKTHTGSQKPFQCRICMRNFSSDRRDLDHTRTHTGEKPFQCRICMRNFSSFQSYLEHLRTHLRGS

SEQ ID NO: 1387 - protein, 179 aa, synthetic construct
SRPGERPFQCRICMRNFSLKEHLTRHLRTHTGEKPFQCRICMRNFSQTQSLQRHLKTHTGGGGSQKPFQCRICMRNFSKNNDLTRHTRTHTGEKPFQCRICMRNFSRREHLVRHLRTHTGSQKPFQCRICMRNFSRREHLTIHLRTHTGEKPFQCRICMRNFSRRDNLNRHLKTHLRGS

SEQ ID NO: 1388 - protein, 182 aa, synthetic construct
SRPGERPFQCRICMRNFSLSQTLKRHTRTHTGEKPFQCRICMRNFSRTDTLARHLRTHTGGGGSQKPFQCRICMRNFSRKRNLIMHTRTHTGEKPFQCRICMRNFSDHSSLKRHLRTHTGGGGSQKPFQCRICMRNFSDSSVLRRHLRTHTGEKPFQCRICMRNFSQGQNLTIHLKTHLRGS

SEQ ID NO: 1389 - protein, 182 aa, synthetic construct
SRPGERPFQCRICMRNFSRSNTLARHTRTHTGEKPFQCRICMRNFSQRSSLVRHLRTHTGGGGSQKPFQCRICMRNFSQSTTLKRHLRTHTGEKPFQCRICMRNFSRTEHLARHLKTHTGGGGSQKPFQCRICMRNFSQRGNLLRHLRTHTGEKPFQCRICMRNFSDQTTLRRHLKTHLRGS

SEQ ID NO: 1390 - protein, 176 aa, synthetic construct
SRPGERPFQCRICMRNFSRQEHLVRHLRTHTGEKPFQCRICMRNFSDPTSLNRHLKTHTGSQKPFQCRICMRNFSRNIHLQTHTRTHTGEKPFQCRICMRNFSRNEHLANHLRTHTGSQKPFQCRICMRNFSDPSNLRRHTRTHTGEKPFQCRICMRNFSLKEHLTRHLRTHLRGS

SEQ ID NO: 1391 - protein, 179 aa, synthetic construct
SRPGERPFQCRICMRNFSSPSKLVRHTRTHTGEKPFQCRICMRNFSLPHHLQRHLRTHTGGGGSQKPFQCRICMRNFSRTDTLARHLRTHTGEKPFQCRICMRNFSRLDMLARHLKTHTGSQKPFQCRICMRNFSQTQNLTRHLRTHTGEKPFQCRICMRNFSRTEHLARHLKTHLRGS

SEQ ID NO: 1392 - protein, 176 aa, synthetic construct
SRPGERPFQCRICMRNFSRKTHLQQHTRTHTGEKPFQCRICMRNFSQSGHLKAHLRTHTGSQKPFQCRICMRNFSTRSKLDRHTRTHTGEKPFQCRICMRNFSQRSSLVRHLRTHTGSQKPFQCRICMRNFSDSPTLRRHTRTHTGEKPFQCRICMRNFSDHSSLKRHLRTHLRGS

SEQ ID NO: 1393 - protein, 179 aa, synthetic construct
SRPGERPFQCRICMRNFSREDNLDRHLRTHTGEKPFQCRICMRNFSRRHGLGRHLKTHTGGGGSQKPFQCRICMRNFSHKSSLTRHLRTHTGEKPFQCRICMRNFSRPDNLPRHLKTHTGSQKPFQCRICMRNFSSDRRDLDHTRTHTGEKPFQCRICMRNFSSFQSYLEHLRTHLRGS

SEQ ID NO: 1394 - protein, 179 aa, synthetic construct
SRPGERPFQCRICMRNFSLKEHLTRHLRTHTGEKPFQCRICMRNFSQTQSLQRHLKTHTGGGGSQKPFQCRICMRNFSKNNDLTRHTRTHTGEKPFQCRICMRNFSRREHLVRHLRTHTGSQKPFQCRICMRNFSRKEHLVGHLRTHTGEKPFQCRICMRNFSRGDNLNRHLKTHLRGS

SEQ ID NO: 1395 - protein, 182 aa, synthetic construct
SRPGERPFQCRICMRNFSKRHTLTRHTRTHTGEKPFQCRICMRNFSQRSSLVRHLRTHTGGGGSQKPFQCRICMRNFSQSTTLKRHLRTHTGEKPFQCRICMRNFSRTEHLARHLKTHTGGGGSQKPFQCRICMRNFSQRGNLARHLRTHTGEKPFQCRICMRNFSDKSVLARHLKTHLRGS

SEQ ID NO: 1396 - protein, 179 aa, synthetic construct
SRPGERPFQCRICMRNFSQSAHLKRHLRTHTGEKPFQCRICMRNFSRGDSLKKHLKTHTGGGGSQKPFQCRICMRNFSRNIHLQTHTRTHTGEKPFQCRICMRNFSRNEHLANHLRTHTGSQKPFQCRICMRNFSDPSNLRRHTRTHTGEKPFQCRICMRNFSLKEHLTRHLRTHLRGS

SEQ ID NO: 1397 - protein, 179 aa, synthetic construct
SRPGERPFQCRICMRNFSRHQHLKLHTRTHTGEKPFQCRICMRNFSDPTVLKRHLRTHTGSQKPFQCRICMRNFSASAGLTRHTRTHTGEKPFQCRICMRNFSRPESLTIHLRTHTGGGGSQKPFQCRICMRNFSLKKDLLRHTRTHTGEKPFQCRICMRNFSDHSSLKRHLRTHLRGS

SEQ ID NO: 1398 - protein, 176 aa, synthetic construct
SRPGERPFQCRICMRNFSRKTHLQQHTRTHTGEKPFQCRICMRNFSQSGHLKAHLRTHTGSQKPFQCRICMRNFSTRSKLDRHTRTHTGEKPFQCRICMRNFSQRSSLVRHLRTHTGSQKPFQCRICMRNFSLKKDLLRHTRTHTGEKPFQCRICMRNFSDHSSLKRHLRTHLRGS

SEQ ID NO: 1399 - protein, 179 aa, synthetic construct
SRPGERPFQCRICMRNFSRADNLGRHLRTHTGEKPFQCRICMRNFSRMEHLPRHLKTHTGGGGSQKPFQCRICMRNFSHKSSLTRHLRTHTGEKPFQCRICMRNFSRPDNLPRHLKTHTGSQKPFQCRICMRNFSDARGLLRHTRTHTGEKPFQCRICMRNFSFHSYLQKHLRTHLRGS

SEQ ID NO: 1400 - protein, 179 aa, synthetic construct
SRPGERPFQCRICMRNFSLKEHLTRHLRTHTGEKPFQCRICMRNFSQTQSLQRHLKTHTGGGGSQKPFQCRICMRNFSKGNDLTRHTRTHTGEKPFQCRICMRNFSRREHLVRHLRTHTGSQKPFQCRICMRNFSRREHLTIHLRTHTGEKPFQCRICMRNFSRRDNLNRHLKTHLRGS

SEQ ID NO: 1401 - protein, 179 aa, synthetic construct
SRPGERPFQCRICMRNFSLKKDLLRHTRTHTGEKPFQCRICMRNFSRQDNLGRHLRTHTGGGGSQKPFQCRICMRNFSDGSTLNRHTRTHTGEKPFQCRICMRNFSQSAHLKRHLRTHTGSQKPFQCRICMRNFSRREHLVRHLRTHTGEKPFQCRICMRNFSVSNSLARHLKTHLRGS

SEQ ID NO: 1402 - protein, 179 aa, synthetic construct
SRPGERPFQCRICMRNFSQSAHLKRHLRTHTGEKPFQCRICMRNFSRKDSLMVHLKTHTGGGGSQKPFQCRICMRNFSRNIHLQTHTRTHTGEKPFQCRICMRNFSRNEHLANHLRTHTGSQKPFQCRICMRNFSEASNLRRHTRTHTGEKPFQCRICMRNFSLKEHLTRHLRTHLRGS

SEQ ID NO: 1403 - protein, 179 aa, synthetic construct
SRPGERPFQCRICMRNFSRHQHLKLHTRTHTGEKPFQCRICMRNFSDPTVLKRHLRTHTGSQKPFQCRICMRNFSASAGLTRHTRTHTGEKPFQCRICMRNFSRPESLTIHLRTHTGGGGSQKPFQCRICMRNFSDSPTLRRHTRTHTGEKPFQCRICMRNFSDHSSLKRHLRTHLRGS

SEQ ID NO: 1404 - protein, 176 aa, synthetic construct
SRPGERPFQCRICMRNFSRKTHLQQHTRTHTGEKPFQCRICMRNFSQSGHLKAHLRTHTGSQKPFQCRICMRNFSLKEHLTRHLRTHTGEKPFQCRICMRNFSQTQSLQRHLKTHTGSQKPFQCRICMRNFSLKKDLLRHTRTHTGEKPFQCRICMRNFSDHSSLKRHLRTHLRGS

SEQ ID NO: 1405 - protein, 179 aa, synthetic construct
SRPGERPFQCRICMRNFSRNTNLTRHTRTHTGEKPFQCRICMRNFSRREHLVRHLRTHTGGGGSQKPFQCRICMRNFSHKSSLTRHLRTHTGEKPFQCRICMRNFSRPDNLPRHLKTHTGSQKPFQCRICMRNFSSDRRDLDHTRTHTGEKPFQCRICMRNFSSFQSYLEHLRTHLRGS

SEQ ID NO: 1406 - protein, 176 aa, synthetic construct
SRPGERPFQCRICMRNFSKNNDLTRHTRTHTGEKPFQCRICMRNFSRREHLVRHLRTHTGSQKPFQCRICMRNFSLNKTLVEHTRTHTGEKPFQCRICMRNFSQSGTLKRHLRTHTGSQKPFQCRICMRNFSRRRNLTLHTRTHTGEKPFQCRICMRNFSRREHLVRHLRTHLRGS

SEQ ID NO: 1407 - protein, 179 aa, synthetic construct
SRPGERPFQCRICMRNFSDSPTLRRHTRTHTGEKPFQCRICMRNFSRQDNLGRHLRTHTGGGGSQKPFQCRICMRNFSDSPTLRRHTRTHTGEKPFQCRICMRNFSQSAHLKRHLRTHTGSQKPFQCRICMRNFSRREHLVRHLRTHTGEKPFQCRICMRNFSVSNSLARHLKTHLRGS

SEQ ID NO: 1408 - protein, 179 aa, synthetic construct
SRPGERPFQCRICMRNFSTNSKLTRHTRTHTGEKPFQCRICMRNFSEAHHLSRHLRTHTGGGGSQKPFQCRICMRNFSRTDTLARHLRTHTGEKPFQCRICMRNFSRLDMLARHLKTHTGSQKPFQCRICMRNFSTTTNLRRHTRTHTGEKPFQCRICMRNFSRREHLVRHLRTHLRGS

SEQ ID NO: 1409 - protein, 179 aa, synthetic construct
SRPGERPFQCRICMRNFSRHQHLKLHTRTHTGEKPFQCRICMRNFSDPTVLKRHLRTHTGSQKPFQCRICMRNFSSNLSLKRHTRTHTGEKPFQCRICMRNFSRPEHLLIHLRTHTGGGGSQKPFQCRICMRNFSLKKDLLRHTRTHTGEKPFQCRICMRNFSDHSSLKRHLRTHLRGS

SEQ ID NO: 1410 - protein, 176 aa, synthetic construct
SRPGERPFQCRICMRNFSKQDHLSVHTRTHTGEKPFQCRICMRNFSQSGHLKAHLRTHTGSQKPFQCRICMRNFSTRSKLDRHTRTHTGEKPFQCRICMRNFSQRSSLVRHLRTHTGSQKPFQCRICMRNFSDSSVLRRHLRTHTGEKPFQCRICMRNFSEGGALRRHLKTHLRGS

SEQ ID NO: 1411 - protein, 179 aa, synthetic construct
SRPGERPFQCRICMRNFSRNTNLTRHTRTHTGEKPFQCRICMRNFSRREHLVRHLRTHTGGGGSQKPFQCRICMRNFSMTSSLRRHTRTHTGEKPFQCRICMRNFSRQDNLGRHLRTHTGSQKPFQCRICMRNFSSDRRDLDHTRTHTGEKPFQCRICMRNFSSFQSYLEHLRTHLRGS

SEQ ID NO: 1412 - protein, 176 aa, synthetic construct
SRPGERPFQCRICMRNFSKNNDLTRHTRTHTGEKPFQCRICMRNFSRREHLVRHLRTHTGSQKPFQCRICMRNFSLNKTLQEHTRTHTGEKPFQCRICMRNFSQSTTLKRHLRTHTGSQKPFQCRICMRNFSRRRNLTLHTRTHTGEKPFQCRICMRNFSRREHLVRHLRTHLRGS

SEQ ID NO: 1413 - protein, 179 aa, synthetic construct
SRPGERPFQCRICMRNFSVRKDLTRHTRTHTGEKPFQCRICMRNFSRQDNLGRHLRTHTGGGGSQKPFQCRICMRNFSDGSTLNRHTRTHTGEKPFQCRICMRNFSQSAHLKRHLRTHTGSQKPFQCRICMRNFSRREHLVRHLRTHTGEKPFQCRICMRNFSVSNSLARHLKTHLRGS

SEQ ID NO: 1414 - protein, 179 aa, synthetic construct
SRPGERPFQCRICMRNFSTNSKLTRHTRTHTGEKPFQCRICMRNFSEAHHLSRHLRTHTGGGGSQKPFQCRICMRNFSRTDTLARHLRTHTGEKPFQCRICMRNFSRLDMLARHLKTHTGSQKPFQCRICMRNFSQTQNLTRHLRTHTGEKPFQCRICMRNFSRTEHLARHLKTHLRGS

SEQ ID NO: 1415 - protein, 179 aa, synthetic construct
SRPGERPFQCRICMRNFSRKQHLQLHTRTHTGEKPFQCRICMRNFSDKSVLRRHLRTHTGSQKPFQCRICMRNFSASAGLTRHTRTHTGEKPFQCRICMRNFSRPESLTIHLRTHTGGGGSQKPFQCRICMRNFSLKKDLLRHTRTHTGEKPFQCRICMRNFSDHSSLKRHLRTHLRGS

SEQ ID NO: 1416 - protein, 179 aa, synthetic construct
SRPGERPFQCRICMRNFSKQHDLVVHTRTHTGEKPFQCRICMRNFSDHSSLKRHLRTHTGGGGSQKPFQCRICMRNFSTHAHLTRHTRTHTGEKPFQCRICMRNFSRRDNLHTHLRTHTGSQKPFQCRICMRNFSTNNNLARHTRTHTGEKPFQCRICMRNFSRTDSLTLHLRTHLRGS

SEQ ID NO: 1417 - protein, 176 aa, synthetic construct
SRPGERPFQCRICMRNFSRRAHLLSHTRTHTGEKPFQCRICMRNFSEAHHLSRHLRTHTGSQKPFQCRICMRNFSKNNDLTRHTRTHTGEKPFQCRICMRNFSRREHLVRHLRTHTGSQKPFQCRICMRNFSRREHLTIHLRTHTGEKPFQCRICMRNFSRRDNLNRHLKTHLRGS

SEQ ID NO: 1418 - protein, 176 aa, synthetic construct
SRPGERPFQCRICMRNFSKGNDLTRHTRTHTGEKPFQCRICMRNFSRREHLVRHLRTHTGSQKPFQCRICMRNFSLNKTLVEHTRTHTGEKPFQCRICMRNFSQSGTLKRHLRTHTGSQKPFQCRICMRNFSRSRNLTLHTRTHTGEKPFQCRICMRNFSRREHLVRHLRTHLRGS

SEQ ID NO: 1419 - protein, 176 aa, synthetic construct
SRPGERPFQCRICMRNFSDRSNLTRHLRTHTGEKPFQCRICMRNFSRPDALPRHLKTHTGSQKPFQCRICMRNFSTPSKLLRHTRTHTGEKPFQCRICMRNFSDSSVLRRHLRTHTGSQKPFQCRICMRNFSDSSVLRRHLRTHTGEKPFQCRICMRNFSENSKLNRHLKTHLRGS

SEQ ID NO: 1420 - protein, 179 aa, synthetic construct
SRPGERPFQCRICMRNFSQNQNLARHLRTHTGEKPFQCRICMRNFSDKSVLARHLKTHTGSQKPFQCRICMRNFSRADNLGRHLRTHTGEKPFQCRICMRNFSKQVTLRNHLKTHTGGGGSQKPFQCRICMRNFSQSAHLKRHLRTHTGEKPFQCRICMRNFSRSDHLSLHLKTHLRGS

SEQ ID NO: 1421 - protein, 179 aa, synthetic construct
SRPGERPFQCRICMRNFSYKHVLVNHTRTHTGEKPFQCRICMRNFSQMSNLDRHLRTHTGSQKPFQCRICMRNFSQAETLKRHLRTHTGEKPFQCRICMRNFSRNWDLTQHLKTHTGGGGSQKPFQCRICMRNFSRREHLVRHLRTHTGEKPFQCRICMRNFSVDHHLRRHLKTHLRGS

SEQ ID NO: 1422 - protein, 179 aa, synthetic construct
SRPGERPFQCRICMRNFSHRTNLIAHTRTHTGEKPFQCRICMRNFSRREHLVRHLRTHTGSQKPFQCRICMRNFSVRHNLTRHLRTHTGEKPFQCRICMRNFSQPHGLAHHLKTHTGGGGSQKPFQCRICMRNFSDESNLRRHTRTHTGEKPFQCRICMRNFSQSHSLKSHLRTHLRGS

SEQ ID NO: 1423 - protein, 179 aa, synthetic construct
SRPGERPFQCRICMRNFSTKQKLQTHTRTHTGEKPFQCRICMRNFSRTDTLARHLRTHTGSQKPFQCRICMRNFSTKQRLTVHTRTHTGEKPFQCRICMRNFSQKQNLKTHLRTHTGGGGSQKPFQCRICMRNFSRRHGLDRHTRTHTGEKPFQCRICMRNFSQRSDLTRHLRTHLRGS

SEQ ID NO: 1424 - protein, 179 aa, synthetic construct
SRPGERPFQCRICMRNFSHRTNLIAHTRTHTGEKPFQCRICMRNFSRREHLVRHLRTHTGSQKPFQCRICMRNFSVRHNLTRHLRTHTGEKPFQCRICMRNFSQPHGLAHHLKTHTGGGGSQKPFQCRICMRNFSELSNLRRHTRTHTGEKPFQCRICMRNFSQSHSLKSHLRTHLRGS

SEQ ID NO: 1425 - protein, 179 aa, synthetic construct
SRPGERPFQCRICMRNFSSTWKLTTHTRTHTGEKPFQCRICMRNFSEQGHLTRHLRTHTGSQKPFQCRICMRNFSRREVLENHLRTHTGEKPFQCRICMRNFSRADGLQLHLKTHTGGGGSQKPFQCRICMRNFSQGGNLTRHLRTHTGEKPFQCRICMRNFSQSQNLKHHLKTHLRGS

SEQ ID NO: 1426 - protein, 182 aa, synthetic construct
SRPGERPFQCRICMRNFSQRPHLTNHLRTHTGEKPFQCRICMRNFSRNDLLKRHLKTHTGGGGSQKPFQCRICMRNFSKKFNLQAHTRTHTGEKPFQCRICMRNFSDPSNLARHLRTHTGGGGSQKPFQCRICMRNFSQQTNLTRHLRTHTGEKPFQCRICMRNFSRVDNLPRHLKTHLRGS

SEQ ID NO: 1427 - protein, 176 aa, synthetic construct
SRPGERPFQCRICMRNFSKGDHLRRHTRTHTGEKPFQCRICMRNFSQRCNLLTHLRTHTGSQKPFQCRICMRNFSQKTHLAVHLRTHTGEKPFQCRICMRNFSQNSHLRRHLKTHTGSQKPFQCRICMRNFSQQAHLVRHTRTHTGEKPFQCRICMRNFSQAETLKRHLRTHLRGS

SEQ ID NO: 1428 - protein, 182 aa, synthetic construct
SRPGERPFQCRICMRNFSQSAHLKRHLRTHTGEKPFQCRICMRNFSRLDMLARHLKTHTGGGGSQKPFQCRICMRNFSKKCNLLSHTRTHTGEKPFQCRICMRNFSERGNLARHLRTHTGGGGSQKPFQCRICMRNFSQHINLTRHLRTHTGEKPFQCRICMRNFSRRDNLLRHLKTHLRGS

SEQ ID NO: 1429 - protein, 176 aa, synthetic construct
SRPGERPFQCRICMRNFSKHDHLARHTRTHTGEKPFQCRICMRNFSQQGNLVTHLRTHTGSQKPFQCRICMRNFSQKVHLQVHLRTHTGEKPFQCRICMRNFSQNSHLRRHLKTHTGSQKPFQCRICMRNFSQQAHLVRHTRTHTGEKPFQCRICMRNFSQAETLKRHLRTHLRGS

SEQ ID NO: 1430 - protein, 179 aa, synthetic construct
SRPGERPFQCRICMRNFSKHSNLTRHTRTHTGEKPFQCRICMRNFSRREHLTIHLRTHTGGGGSQKPFQCRICMRNFSKKDHLHRHTRTHTGEKPFQCRICMRNFSQTTTLKRHLRTHTGSQKPFQCRICMRNFSEEHHLTRHLRTHTGEKPFQCRICMRNFSREDVLGRHLKTHLRGS

SEQ ID NO: 1431 - protein, 176 aa, synthetic construct
SRPGERPFQCRICMRNFSQQAHLVRHTRTHTGEKPFQCRICMRNFSQAETLKRHLRTHTGSQKPFQCRICMRNFSRKQHLTLHTRTHTGEKPFQCRICMRNFSDRGNLTRHLRTHTGSQKPFQCRICMRNFSRPHNLLRHTRTHTGEKPFQCRICMRNFSRREHLVRHLRTHLRGS

SEQ ID NO: 1432 - protein, 179 aa, synthetic construct
SRPGERPFQCRICMRNFSRQHHLTYHTRTHTGEKPFQCRICMRNFSRTDTLARHLRTHTGSQKPFQCRICMRNFSGPTALRHHTRTHTGEKPFQCRICMRNFSRREVLENHLRTHTGGGGSQKPFQCRICMRNFSHKSSLTRHLRTHTGEKPFQCRICMRNFSRIDNLIRHLKTHLRGS

SEQ ID NO: 1433 - protein, 179 aa, synthetic construct
SRPGERPFQCRICMRNFSKKCHLVTHTRTHTGEKPFQCRICMRNFSRRDILGRHLRTHTGSQKPFQCRICMRNFSGHTALRHHTRTHTGEKPFQCRICMRNFSRREVLENHLRTHTGGGGSQKPFQCRICMRNFSHKSSLTRHLRTHTGEKPFQCRICMRNFSRPDNLPRHLKTHLRGS

SEQ ID NO: 1434 - protein, 179 aa, synthetic construct
SRPGERPFQCRICMRNFSRQHHLTYHTRTHTGEKPFQCRICMRNFSRTDTLARHLRTHTGGGGSQKPFQCRICMRNFSLRANLQRHTRTHTGEKPFQCRICMRNFSQPHSLAVHLRTHTGSQKPFQCRICMRNFSHKSSLTRHLRTHTGEKPFQCRICMRNFSRIDNLIRHLKTHLRGS

SEQ ID NO: 1435 - protein, 179 aa, synthetic construct
SRPGERPFQCRICMRNFSKKCHLVTHTRTHTGEKPFQCRICMRNFSRRDILGRHLRTHTGGGGSQKPFQCRICMRNFSQQTNLTRHLRTHTGEKPFQCRICMRNFSVAHGLQAHLKTHTGSQKPFQCRICMRNFSHKSSLTRHLRTHTGEKPFQCRICMRNFSRIDNLIRHLKTHLRGS

SEQ ID NO: 1436 - protein, 179 aa, synthetic construct
SRPGERPFQCRICMRNFSRARNLTLHTRTHTGEKPFQCRICMRNFSQSTTLKRHLRTHTGGGGSQKPFQCRICMRNFSQAGNLVRHLRTHTGEKPFQCRICMRNFSQKVNLGIHLKTHTGSQKPFQCRICMRNFSTNSSLTRHLRTHTGEKPFQCRICMRNFSISHNLARHLKTHLRGS

SEQ ID NO: 1437 - protein, 179 aa, synthetic construct
SRPGERPFQCRICMRNFSDSSVLRRHLRTHTGEKPFQCRICMRNFSQGGTLRRHLKTHTGSQKPFQCRICMRNFSRREHLVRHLRTHTGEKPFQCRICMRNFSRRDNLNRHLKTHTGGGGSQKPFQCRICMRNFSRQDNLHTHLRTHTGEKPFQCRICMRNFSQGGTLRRHLKTHLRGS

SEQ ID NO: 1438 - protein, 176 aa, synthetic construct
SRPGERPFQCRICMRNFSSPSKLVRHTRTHTGEKPFQCRICMRNFSRKDHLTTHLRTHTGSQKPFQCRICMRNFSRREHLTIHLRTHTGEKPFQCRICMRNFSRLDMLARHLKTHTGSQKPFQCRICMRNFSGHTALRHHTRTHTGEKPFQCRICMRNFSRREVLENHLRTHLRGS

SEQ ID NO: 1439 - protein, 179 aa, synthetic construct
SRPGERPFQCRICMRNFSKHHTLQRHTRTHTGEKPFQCRICMRNFSRREHLVRHLRTHTGGGGSQKPFQCRICMRNFSRQHHLTYHTRTHTGEKPFQCRICMRNFSRTDTLARHLRTHTGSQKPFQCRICMRNFSGPTALRHHTRTHTGEKPFQCRICMRNFSRREVLENHLRTHLRGS

SEQ ID NO: 1440 - protein, 182 aa, synthetic construct
SRPGERPFQCRICMRNFSQQTNLTRHLRTHTGEKPFQCRICMRNFSANRTLVHHLKTHTGGGGSQKPFQCRICMRNFSDRGNLTRHLRTHTGEKPFQCRICMRNFSRKTGLLIHLKTHTGGGGSQKPFQCRICMRNFSRREVLENHLRTHTGEKPFQCRICMRNFSRRDNLNRHLKTHLRGS

SEQ ID NO: 1441 - protein, 176 aa, synthetic construct
SRPGERPFQCRICMRNFSDHSSLKRHLRTHTGEKPFQCRICMRNFSQSNTLSDHLKTHTGSQKPFQCRICMRNFSRVDHLHRHLRTHTGEKPFQCRICMRNFSRSHTLTSHLKTHTGSQKPFQCRICMRNFSTNLTLVRHTRTHTGEKPFQCRICMRNFSQGGTLNRHLRTHLRGS

SEQ ID NO: 1442 - protein, 176 aa, synthetic construct
SRPGERPFQCRICMRNFSDHSSLKRHLRTHTGEKPFQCRICMRNFSQSNTLRSHLKTHTGSQKPFQCRICMRNFSRVDHLHRHLRTHTGEKPFQCRICMRNFSRSHTLTSHLKTHTGSQKPFQCRICMRNFSTPQVLRRHTRTHTGEKPFQCRICMRNFSQGGTLNRHLRTHLRGS

SEQ ID NO: 1443 - protein, 176 aa, synthetic construct
SRPGERPFQCRICMRNFSRVDHLHRHLRTHTGEKPFQCRICMRNFSQAATLQRHLKTHTGSQKPFQCRICMRNFSRREHLVRHLRTHTGEKPFQCRICMRNFSRPDALPRHLKTHTGSQKPFQCRICMRNFSQSAHLKRHLRTHTGEKPFQCRICMRNFSVGNSLSRHLKTHLRGS

SEQ ID NO: 1444 - protein, 176 aa, synthetic construct
SRPGERPFQCRICMRNFSRQEHLVRHLRTHTGEKPFQCRICMRNFSEGGNLMRHLKTHTGSQKPFQCRICMRNFSKKDHLHRHTRTHTGEKPFQCRICMRNFSRREVLENHLRTHTGSQKPFQCRICMRNFSQSAHLKRHLRTHTGEKPFQCRICMRNFSLKHDLRRHLKTHLRGS

SEQ ID NO: 1445 - protein, 179 aa, synthetic construct
SRPGERPFQCRICMRNFSQGGTLRRHLRTHTGEKPFQCRICMRNFSQTAHLQTHLKTHTGSQKPFQCRICMRNFSRQDNLGRHLRTHTGEKPFQCRICMRNFSKNVSLQWHLKTHTGGGGSQKPFQCRICMRNFSKQHDLVVHTRTHTGEKPFQCRICMRNFSDHSSLKRHLRTHLRGS

SEQ ID NO: 1446 - protein, 179 aa, synthetic construct
SRPGERPFQCRICMRNFSQGGTLRRHLRTHTGEKPFQCRICMRNFSQTAHLQTHLKTHTGSQKPFQCRICMRNFSRPDNLARHLRTHTGEKPFQCRICMRNFSKRVSLEHHLKTHTGGGGSQKPFQCRICMRNFSRRVTLTRHTRTHTGEKPFQCRICMRNFSESSVLIRHLRTHLRGS

SEQ ID NO: 1447 - protein, 176 aa, synthetic construct
SRPGERPFQCRICMRNFSQRSDLTRHLRTHTGEKPFQCRICMRNFSRRDGLNGHLKTHTGSQKPFQCRICMRNFSRQEHLVRHLRTHTGEKPFQCRICMRNFSEGGNLMRHLKTHTGSQKPFQCRICMRNFSKKDHLHRHTRTHTGEKPFQCRICMRNFSRREVLENHLRTHLRGS

SEQ ID NO: 1448 - protein, 179 aa, synthetic construct
SRPGERPFQCRICMRNFSQSPHLKRHLRTHTGEKPFQCRICMRNFSQSTSLQRHLKTHTGGGGSQKPFQCRICMRNFSRKECLTIHLRTHTGEKPFQCRICMRNFSQNSHLRRHLKTHTGSQKPFQCRICMRNFSQSAHLKRHLRTHTGEKPFQCRICMRNFSRSDHLSLHLKTHLRGS

SEQ ID NO: 1449 - protein, 179 aa, synthetic construct
SRPGERPFQCRICMRNFSRNHNLERHTRTHTGEKPFQCRICMRNFSRREHLTIHLRTHTGGGGSQKPFQCRICMRNFSKKDHLHRHTRTHTGEKPFQCRICMRNFSQTTTLKRHLRTHTGSQKPFQCRICMRNFSEEHHLTRHLRTHTGEKPFQCRICMRNFSREDVLGRHLKTHLRGS

SEQ ID NO: 1450 - protein, 179 aa, synthetic construct
SRPGERPFQCRICMRNFSKKCHLVTHTRTHTGEKPFQCRICMRNFSRRDILGRHLRTHTGGGGSQKPFQCRICMRNFSLRANLQRHTRTHTGEKPFQCRICMRNFSQPHSLAVHLRTHTGSQKPFQCRICMRNFSHKSSLTRHLRTHTGEKPFQCRICMRNFSRIDNLIRHLKTHLRGS

SEQ ID NO: 1451 - protein, 179 aa, synthetic construct
SRPGERPFQCRICMRNFSRRAHLLSHTRTHTGEKPFQCRICMRNFSEAHHLSRHLRTHTGSQKPFQCRICMRNFSKNNDLTRHTRTHTGEKPFQCRICMRNFSRREHLVRHLRTHTGGGGSQKPFQCRICMRNFSRREVLENHLRTHTGEKPFQCRICMRNFSQSAHLGRHLKTHLRGS

SEQ ID NO: 1452 - protein, 176 aa, synthetic construct
SRPGERPFQCRICMRNFSSPSKLVRHTRTHTGEKPFQCRICMRNFSRQDHLTNHLRTHTGSQKPFQCRICMRNFSRQHHLTYHTRTHTGEKPFQCRICMRNFSRTDTLARHLRTHTGSQKPFQCRICMRNFSGHTALRHHTRTHTGEKPFQCRICMRNFSRREVLENHLRTHLRGS

SEQ ID NO: 1453 - protein, 179 aa, synthetic construct
SRPGERPFQCRICMRNFSRTNDLARHTRTHTGEKPFQCRICMRNFSRREHLVRHLRTHTGGGGSQKPFQCRICMRNFSRREHLTIHLRTHTGEKPFQCRICMRNFSRTDLLGRHLKTHTGSQKPFQCRICMRNFSGPTALRHHTRTHTGEKPFQCRICMRNFSRREVLENHLRTHLRGS

SEQ ID NO: 1454 - protein, 182 aa, synthetic construct
SRPGERPFQCRICMRNFSRSNTLARHTRTHTGEKPFQCRICMRNFSQRSSLVRHLRTHTGGGGSQKPFQCRICMRNFSQSGTLHRHLRTHTGEKPFQCRICMRNFSRTEHLARHLKTHTGGGGSQKPFQCRICMRNFSQRGNLARHLRTHTGEKPFQCRICMRNFSDKSVLARHLKTHLRGS

SEQ ID NO: 1455 - protein, 179 aa, synthetic construct
SRPGERPFQCRICMRNFSDSPTLRRHTRTHTGEKPFQCRICMRNFSRQDNLGRHLRTHTGGGGSQKPFQCRICMRNFSDPSVLTRHLRTHTGEKPFQCRICMRNFSQNSHLRRHLKTHTGSQKPFQCRICMRNFSKKDHLHRHTRTHTGEKPFQCRICMRNFSLSQTLKRHLRTHLRGS

SEQ ID NO: 1456 - protein, 179 aa, synthetic construct
SRPGERPFQCRICMRNFSRNTNLTRHTRTHTGEKPFQCRICMRNFSRREHLVRHLRTHTGGGGSQKPFQCRICMRNFSHKSSLTRHLRTHTGEKPFQCRICMRNFSRPDNLPRHLKTHTGSQKPFQCRICMRNFSDARGLLRHTRTHTGEKPFQCRICMRNFSFHSYLQKHLRTHLRGS

SEQ ID NO: 1457 - protein, 179 aa, synthetic construct
SRPGERPFQCRICMRNFSSPSKLARHTRTHTGEKPFQCRICMRNFSQSPSLKRHLRTHTGGGGSQKPFQCRICMRNFSKNNDLTRHTRTHTGEKPFQCRICMRNFSRREHLVRHLRTHTGSQKPFQCRICMRNFSRREHLTIHLRTHTGEKPFQCRICMRNFSRRDNLNRHLKTHLRGS

SEQ ID NO: 1458 - protein, 179 aa, synthetic construct
SRPGERPFQCRICMRNFSVPSKLLRHTRTHTGEKPFQCRICMRNFSQRSSLVRHLRTHTGGGGSQKPFQCRICMRNFSKNNDLTRHTRTHTGEKPFQCRICMRNFSRREHLVRHLRTHTGSQKPFQCRICMRNFSRREHLTIHLRTHTGEKPFQCRICMRNFSRRDNLNRHLKTHLRGS

SEQ ID NO: 1459 - protein, 182 aa, synthetic construct
SRPGERPFQCRICMRNFSLSQTLKRHLRTHTGEKPFQCRICMRNFSRLDMLARHLKTHTGGGGSQKPFQCRICMRNFSRKRNLIMHTRTHTGEKPFQCRICMRNFSDHSSLKRHLRTHTGGGGSQKPFQCRICMRNFSDSSVLRRHLRTHTGEKPFQCRICMRNFSQNVGLKIHLKTHLRGS

SEQ ID NO: 1460 - protein, 182 aa, synthetic construct; identical to SEQ ID NO: 1440

SEQ ID NO: 1461 - protein, 179 aa, synthetic construct
SRPGERPFQCRICMRNFSKGNDLTRHTRTHTGEKPFQCRICMRNFSRREHLVRHLRTHTGGGGSQKPFQCRICMRNFSRREVLENHLRTHTGEKPFQCRICMRNFSQSAHLGRHLKTHTGSQKPFQCRICMRNFSSRQALKRHTRTHTGEKPFQCRICMRNFSQSGTLVRHLRTHLRGS

SEQ ID NO: 1462 - protein, 179 aa, synthetic construct
SRPGERPFQCRICMRNFSQSAHLKRHLRTHTGEKPFQCRICMRNFSRRDSLPLHLKTHTGGGGSQKPFQCRICMRNFSRNIHLQTHTRTHTGEKPFQCRICMRNFSRNEHLANHLRTHTGSQKPFQCRICMRNFSDPSNLRRHTRTHTGEKPFQCRICMRNFSLKEHLTRHLRTHLRGS

SEQ ID NO: 1463 - protein, 179 aa, synthetic construct
SRPGERPFQCRICMRNFSRPSDLSVHTRTHTGEKPFQCRICMRNFSDHSSLKRHLRTHTGGGGSQKPFQCRICMRNFSTHAHLTRHTRTHTGEKPFQCRICMRNFSRRDNLHTHLRTHTGSQKPFQCRICMRNFSTNNNLARHTRTHTGEKPFQCRICMRNFSRTDSLTLHLRTHLRGS

SEQ ID NO: 1464 - protein, 179 aa, synthetic construct
SRPGERPFQCRICMRNFSKGNDLTRHTRTHTGEKPFQCRICMRNFSRREHLVRHLRTHTGGGGSQKPFQCRICMRNFSRREVLENHLRTHTGEKPFQCRICMRNFSQSAHLGRHLKTHTGSQKPFQCRICMRNFSQRSDLTRHLRTHTGEKPFQCRICMRNFSQGGTLRRHLKTHLRGS

SEQ ID NO: 1465 - protein, 179 aa, synthetic construct
SRPGERPFQCRICMRNFSQSAHLKRHLRTHTGEKPFQCRICMRNFSRKDSLMVHLKTHTGGGGSQKPFQCRICMRNFSRNIHLQTHTRTHTGEKPFQCRICMRNFSRNEHLANHLRTHTGSQKPFQCRICMRNFSDPSNLRRHTRTHTGEKPFQCRICMRNFSLKEHLTRHLRTHLRGS

SEQ ID NO: 1466 - protein, 179 aa, synthetic construct
SRPGERPFQCRICMRNFSRPSDLSVHTRTHTGEKPFQCRICMRNFSDHSSLKRHLRTHTGGGGSQKPFQCRICMRNFSTAAHLTRHTRTHTGEKPFQCRICMRNFSRQDNLHTHLRTHTGSQKPFQCRICMRNFSTNNNLARHTRTHTGEKPFQCRICMRNFSRTDSLTLHLRTHLRGS

SEQ ID NO: 1467 - protein, 182 aa, synthetic construct
SRPGERPFQCRICMRNFSRNHTLTRHTRTHTGEKPFQCRICMRNFSQRSSLVRHLRTHTGGGGSQKPFQCRICMRNFSQSGTLKRHLRTHTGEKPFQCRICMRNFSRNDKLVPHLKTHTGGGGSQKPFQCRICMRNFSQGGNLTRHLRTHTGEKPFQCRICMRNFSERRGLHRHLKTHLRGS

SEQ ID NO: 1468 - protein, 179 aa, synthetic construct
SRPGERPFQCRICMRNFSSPSKLVRHTRTHTGEKPFQCRICMRNFSLPHHLQRHLRTHTGGGGSQKPFQCRICMRNFSRRDDLTRHLRTHTGEKPFQCRICMRNFSRLDMLARHLKTHTGSQKPFQCRICMRNFSQTQNLTRHLRTHTGEKPFQCRICMRNFSRTEHLARHLKTHLRGS

SEQ ID NO: 1469 - protein, 176 aa, synthetic construct
SRPGERPFQCRICMRNFSQSPHLKRHLRTHTGEKPFQCRICMRNFSRTEHLARHLKTHTGSQKPFQCRICMRNFSMTSSLRRHTRTHTGEKPFQCRICMRNFSRQDNLGRHLRTHTGSQKPFQCRICMRNFSSDRRDLDHTRTHTGEKPFQCRICMRNFSSFQSYLEHLRTHLRGS

SEQ ID NO: 1470 - protein, 182 aa, synthetic construct
SRPGERPFQCRICMRNFSKRHTLTRHTRTHTGEKPFQCRICMRNFSQRSSLVRHLRTHTGGGGSQKPFQCRICMRNFSQSGTLKRHLRTHTGEKPFQCRICMRNFSRNDKLVPHLKTHTGGGGSQKPFQCRICMRNFSQGGNLTRHLRTHTGEKPFQCRICMRNFSERRGLHRHLKTHLRGS

SEQ ID NO: 1471 - protein, 179 aa, synthetic construct
SRPGERPFQCRICMRNFSTNSKLTRHTRTHTGEKPFQCRICMRNFSEAHHLSRHLRTHTGGGGSQKPFQCRICMRNFSRTDTLARHLRTHTGEKPFQCRICMRNFSRLDMLARHLKTHTGSQKPFQCRICMRNFSQLSNLTRHTRTHTGEKPFQCRICMRNFSRREHLVRHLRTHLRGS

SEQ ID NO: 1472 - protein, 176 aa, synthetic construct
SRPGERPFQCRICMRNFSQSAHLKRHLRTHTGEKPFQCRICMRNFSRTEHLARHLKTHTGSQKPFQCRICMRNFSHKSSLTRHLRTHTGEKPFQCRICMRNFSRPDNLPRHLKTHTGSQKPFQCRICMRNFSDARGLLRHTRTHTGEKPFQCRICMRNFSFHSYLQKHLRTHLRGS

SEQ ID NO: 1473 - protein, 182 aa, synthetic construct
SRPGERPFQCRICMRNFSKRHTLTRHTRTHTGEKPFQCRICMRNFSQRSSLVRHLRTHTGGGGSQKPFQCRICMRNFSQSTTLKRHLRTHTGEKPFQCRICMRNFSRTEHLARHLKTHTGGGGSQKPFQCRICMRNFSQGGNLTRHLRTHTGEKPFQCRICMRNFSERRGLHRHLKTHLRGS

SEQ ID NO: 1474 - protein, 179 aa, synthetic construct
SRPGERPFQCRICMRNFSRKQHLTLHTRTHTGEKPFQCRICMRNFSDTSVLNRHLRTHTGSQKPFQCRICMRNFSLRQTLARHTRTHTGEKPFQCRICMRNFSRPESLTIHLRTHTGGGGSQKPFQCRICMRNFSDSPTLRRHTRTHTGEKPFQCRICMRNFSDHSSLKRHLRTHLRGS

SEQ ID NO: 1475 - protein, 176 aa, synthetic construct
SRPGERPFQCRICMRNFSRRAHLLSHTRTHTGEKPFQCRICMRNFSEAHHLSRHLRTHTGSQKPFQCRICMRNFSKGNDLTRHTRTHTGEKPFQCRICMRNFSRREHLVRHLRTHTGSQKPFQCRICMRNFSRREHLTIHLRTHTGEKPFQCRICMRNFSRQDNLQRHLKTHLRGS

SEQ ID NO: 1476 - protein, 179 aa, synthetic construct
SRPGERPFQCRICMRNFSVRKDLTRHTRTHTGEKPFQCRICMRNFSRQDNLGRHLRTHTGGGGSQKPFQCRICMRNFSDPSVLTRHLRTHTGEKPFQCRICMRNFSQNSHLRRHLKTHTGSQKPFQCRICMRNFSKKDHLHRHTRTHTGEKPFQCRICMRNFSLSQTLKRHLRTHLRGS

SEQ ID NO: 1477 - protein, 179 aa, synthetic construct
SRPGERPFQCRICMRNFSRKQHLQLHTRTHTGEKPFQCRICMRNFSDKSVLRRHLRTHTGSQKPFQCRICMRNFSSNLSLKRHTRTHTGEKPFQCRICMRNFSRPEHLLIHLRTHTGGGGSQKPFQCRICMRNFSDSPTLRRHTRTHTGEKPFQCRICMRNFSDHSSLKRHLRTHLRGS

SEQ ID NO: 1478 - protein, 176 aa, synthetic construct
SRPGERPFQCRICMRNFSRRAHLLSHTRTHTGEKPFQCRICMRNFSEAHHLSRHLRTHTGSQKPFQCRICMRNFSKNNDLTRHTRTHTGEKPFQCRICMRNFSRREHLVRHLRTHTGSQKPFQCRICMRNFSRAEHLAIHLRTHTGEKPFQCRICMRNFSRRDNLNRHLKTHLRGS

SEQ ID NO: 1479 - protein, 179 aa, synthetic construct
SRPGERPFQCRICMRNFSDSPTLRRHTRTHTGEKPFQCRICMRNFSRQDNLGRHLRTHTGGGGSQKPFQCRICMRNFSDGSTLNRHTRTHTGEKPFQCRICMRNFSQSAHLKRHLRTHTGSQKPFQCRICMRNFSRREHLVRHLRTHTGEKPFQCRICMRNFSVSNSLARHLKTHLRGS

SEQ ID NO: 1480 - protein, 176 aa, synthetic construct
SRPGERPFQCRICMRNFSKQDHLSVHTRTHTGEKPFQCRICMRNFSQSGHLKAHLRTHTGSQKPFQCRICMRNFSTRSKLDRHTRTHTGEKPFQCRICMRNFSQRSSLVRHLRTHTGSQKPFQCRICMRNFSLKKDLLRHTRTHTGEKPFQCRICMRNFSDHSSLKRHLRTHLRGS

SEQ ID NO: 1481 - protein, 176 aa, synthetic construct
SRPGERPFQCRICMRNFSKGNDLTRHTRTHTGEKPFQCRICMRNFSRREHLVRHLRTHTGSQKPFQCRICMRNFSLNKTLVEHTRTHTGEKPFQCRICMRNFSQSGTLKRHLRTHTGSQKPFQCRICMRNFSRTRNLVLHTRTHTGEKPFQCRICMRNFSRREHLVRHLRTHLRGS

SEQ ID NO: 1482 - protein, 179 aa, synthetic construct
SRPGERPFQCRICMRNFSVRKDLTRHTRTHTGEKPFQCRICMRNFSRQDNLGRHLRTHTGGGGSQKPFQCRICMRNFSDGSTLNRHTRTHTGEKPFQCRICMRNFSQSAHLKRHLRTHTGSQKPFQCRICMRNFSKKDHLHRHTRTHTGEKPFQCRICMRNFSLSQTLKRHLRTHLRGS

SEQ ID NO: 1483 - protein, 176 aa, synthetic construct
SRPGERPFQCRICMRNFSRGSHLQQHTRTHTGEKPFQCRICMRNFSQSGHLKAHLRTHTGSQKPFQCRICMRNFSLKEHLTRHLRTHTGEKPFQCRICMRNFSQTQSLQRHLKTHTGSQKPFQCRICMRNFSDSSVLRRHLRTHTGEKPFQCRICMRNFSEGGALRRHLKTHLRGS

SEQ ID NO: 1484 - protein, 176 aa, synthetic construct
SRPGERPFQCRICMRNFSKGNDLTRHTRTHTGEKPFQCRICMRNFSRREHLVRHLRTHTGSQKPFQCRICMRNFSLKKTLKEHTRTHTGEKPFQCRICMRNFSQSTTLKRHLRTHTGSQKPFQCRICMRNFSRTRNLVLHTRTHTGEKPFQCRICMRNFSRREHLVRHLRTHLRGS

SEQ ID NO: 1485 - protein, 182 aa, synthetic construct
SRPGERPFQCRICMRNFSQSAHLKRHLRTHTGEKPFQCRICMRNFSRTDDLGRHLKTHTGGGGSQKPFQCRICMRNFSKKFNLQAHTRTHTGEKPFQCRICMRNFSDPSNLARHLRTHTGGGGSQKPFQCRICMRNFSQGANLSRHLRTHTGEKPFQCRICMRNFSRRDNLLRHLKTHLRGS

SEQ ID NO: 1486 - protein, 176 aa, synthetic construct
SRPGERPFQCRICMRNFSLREPLDRHTRTHTGEKPFQCRICMRNFSDSSVLRRHLRTHTGSQKPFQCRICMRNFSQKENLKSHLRTHTGEKPFQCRICMRNFSMNHHLKAHLKTHTGSQKPFQCRICMRNFSQNEHLKVHLRTHTGEKPFQCRICMRNFSVGSNLTRHLKTHLRGS

SEQ ID NO: 1487 - protein, 179 aa, synthetic construct
SRPGERPFQCRICMRNFSKKFNLQAHTRTHTGEKPFQCRICMRNFSDPSNLARHLRTHTGGGGSQKPFQCRICMRNFSQHINLTRHLRTHTGEKPFQCRICMRNFSRRDNLLRHLKTHTGSQKPFQCRICMRNFSQSAHLKRHLRTHTGEKPFQCRICMRNFSRLDMLARHLKTHLRGS

SEQ ID NO: 1488 - protein, 176 aa, synthetic construct
SRPGERPFQCRICMRNFSRREHLVRHLRTHTGEKPFQCRICMRNFSDMGNLGRHLKTHTGSQKPFQCRICMRNFSKKDHLHRHTRTHTGEKPFQCRICMRNFSRREVLENHLRTHTGSQKPFQCRICMRNFSQSAHLKRHLRTHTGEKPFQCRICMRNFSLKHDLRRHLKTHLRGS

SEQ ID NO: 1489 - protein, 179 aa, synthetic construct
SRPGERPFQCRICMRNFSQKSNLTTHLRTHTGEKPFQCRICMRNFSRRHGLGRHLKTHTGSQKPFQCRICMRNFSGASALRQHTRTHTGEKPFQCRICMRNFSQQTNLTRHLRTHTGGGGSQKPFQCRICMRNFSGHSALRQHTRTHTGEKPFQCRICMRNFSQSAHLKRHLRTHLRGS

SEQ ID NO: 1490 - protein, 179 aa, synthetic construct
SRPGERPFQCRICMRNFSGMLSLAVHTRTHTGEKPFQCRICMRNFSDASNLRRHLRTHTGSQKPFQCRICMRNFSRHEHLITHTRTHTGEKPFQCRICMRNFSRADNLGRHLRTHTGGGGSQKPFQCRICMRNFSRGDNLKTHLRTHTGEKPFQCRICMRNFSHGHRLKTHLKTHLRGS

SEQ ID NO: 1491 - protein, 179 aa, synthetic construct
SRPGERPFQCRICMRNFSQQTNLTRHLRTHTGEKPFQCRICMRNFSQKANLGVHLKTHTGSQKPFQCRICMRNFSHESSLRRHLRTHTGEKPFQCRICMRNFSISHNLARHLKTHTGGGGSQKPFQCRICMRNFSKNNDLLKHTRTHTGEKPFQCRICMRNFSDISVLHRHLRTHLRGS

SEQ ID NO: 1492 - protein, 179 aa, synthetic construct
SRPGERPFQCRICMRNFSSPSKLARHTRTHTGEKPFQCRICMRNFSVKETLTRHLRTHTGGGGSQKPFQCRICMRNFSTRDALTKHTRTHTGEKPFQCRICMRNFSRTDTLARHLRTHTGSQKPFQCRICMRNFSRPHNLLRHTRTHTGEKPFQCRICMRNFSRREVLENHLRTHLRGS

SEQ ID NO: 1493 - protein, 176 aa, synthetic construct
SRPGERPFQCRICMRNFSQGSSLRRHLRTHTGEKPFQCRICMRNFSISHNLARHLKTHTGSQKPFQCRICMRNFSDSSVLRRHLRTHTGEKPFQCRICMRNFSENSKLNRHLKTHTGSQKPFQCRICMRNFSRQDNLGRHLRTHTGEKPFQCRICMRNFSRSDTLPVHLKTHLRGS

SEQ ID NO: 1494 - protein, 179 aa, synthetic construct
SRPGERPFQCRICMRNFSKGNDLTRHTRTHTGEKPFQCRICMRNFSRREHLVRHLRTHTGSQKPFQCRICMRNFSRREHLTIHLRTHTGEKPFQCRICMRNFSRQDNLQRHLKTHTGGGGSQKPFQCRICMRNFSSRQALKRHTRTHTGEKPFQCRICMRNFSQSGTLVRHLRTHLRGS

SEQ ID NO: 1495 - protein, 182 aa, synthetic construct
SRPGERPFQCRICMRNFSQSAHLKRHLRTHTGEKPFQCRICMRNFSRLDMLARHLKTHTGGGGSQKPFQCRICMRNFSSRFNLSTHTRTHTGEKPFQCRICMRNFSDASNLRRHLRTHTGGGGSQKPFQCRICMRNFSQQTNLTRHLRTHTGEKPFQCRICMRNFSRVDNLPRHLKTHLRGS

SEQ ID NO: 1496 - protein, 176 aa, synthetic construct
SRPGERPFQCRICMRNFSLREPLDRHTRTHTGEKPFQCRICMRNFSDSSVLRRHLRTHTGSQKPFQCRICMRNFSQKCNLQAHLRTHTGEKPFQCRICMRNFSMNHHLKAHLKTHTGSQKPFQCRICMRNFSQNEHLTVHLRTHTGEKPFQCRICMRNFSVMGNLTRHLKTHLRGS

SEQ ID NO: 1497 - protein, 179 aa, synthetic construct
SRPGERPFQCRICMRNFSKKCNLLSHTRTHTGEKPFQCRICMRNFSERGNLARHLRTHTGGGGSQKPFQCRICMRNFSQGANLSRHLRTHTGEKPFQCRICMRNFSRRDNLLRHLKTHTGSQKPFQCRICMRNFSQSAHLKRHLRTHTGEKPFQCRICMRNFSRLDMLARHLKTHLRGS

SEQ ID NO: 1498 - protein, 176 aa, synthetic construct
SRPGERPFQCRICMRNFSRQEHLVRHLRTHTGEKPFQCRICMRNFSEGGNLMRHLKTHTGSQKPFQCRICMRNFSRREHLVRHLRTHTGEKPFQCRICMRNFSRPDALPRHLKTHTGSQKPFQCRICMRNFSQSAHLKRHLRTHTGEKPFQCRICMRNFSVGNSLSRHLKTHLRGS

SEQ ID NO: 1499 - protein, 179 aa, synthetic construct
SRPGERPFQCRICMRNFSAKSGLSAHTRTHTGEKPFQCRICMRNFSEASNLTRHLRTHTGSQKPFQCRICMRNFSRHEHLITHTRTHTGEKPFQCRICMRNFSRADNLGRHLRTHTGGGGSQKPFQCRICMRNFSRLDNLKTHLRTHTGEKPFQCRICMRNFSHGHRLKTHLKTHLRGS

SEQ ID NO: 1500 - protein, 179 aa, synthetic construct
SRPGERPFQCRICMRNFSQGGTLRRHLRTHTGEKPFQCRICMRNFSQTAHLQTHLKTHTGSQKPFQCRICMRNFSRADNLVRHLRTHTGEKPFQCRICMRNFSKKVSLQMHLKTHTGGGGSQKPFQCRICMRNFSKQHDLVVHTRTHTGEKPFQCRICMRNFSDHSSLKRHLRTHLRGS

SEQ ID NO: 1501 - protein, 179 aa, synthetic construct
SRPGERPFQCRICMRNFSSPSKLARHTRTHTGEKPFQCRICMRNFSVKETLTRHLRTHTGGGGSQKPFQCRICMRNFSTRDALTKHTRTHTGEKPFQCRICMRNFSRTDTLARHLRTHTGSQKPFQCRICMRNFSRQDNLGRHLRTHTGEKPFQCRICMRNFSRLDVLAMHLKTHLRGS

SEQ ID NO: 1502 - protein, 176 aa, synthetic construct
SRPGERPFQCRICMRNFSQRSDLTRHLRTHTGEKPFQCRICMRNFSRVDGLGHHLKTHTGSQKPFQCRICMRNFSRQEHLVRHLRTHTGEKPFQCRICMRNFSEGGNLMRHLKTHTGSQKPFQCRICMRNFSKKDHLHRHTRTHTGEKPFQCRICMRNFSRREVLENHLRTHLRGS

SEQ ID NO: 1503 - protein, 176 aa, synthetic construct
SRPGERPFQCRICMRNFSQQQALKRHTRTHTGEKPFQCRICMRNFSVRHNLTRHLRTHTGSQKPFQCRICMRNFSDSSVLRRHLRTHTGEKPFQCRICMRNFSENSKLNRHLKTHTGSQKPFQCRICMRNFSRQDNLGRHLRTHTGEKPFQCRICMRNFSRSDTLPVHLKTHLRGS

SEQ ID NO: 1504 - protein, 179 aa, synthetic construct
SRPGERPFQCRICMRNFSKGNDLTRHTRTHTGEKPFQCRICMRNFSRREHLVRHLRTHTGSQKPFQCRICMRNFSRREHLTIHLRTHTGEKPFQCRICMRNFSRRDNLNRHLKTHTGGGGSQKPFQCRICMRNFSTKQVLDRHTRTHTGEKPFQCRICMRNFSQSTTLKRHLRTHLRGS

SEQ ID NO: 1505 - protein, 182 aa, synthetic construct
SRPGERPFQCRICMRNFSQRPHLTNHLRTHTGEKPFQCRICMRNFSRNDLLKRHLKTHTGGGGSQKPFQCRICMRNFSKKFNLQAHTRTHTGEKPFQCRICMRNFSDPSNLARHLRTHTGGGGSQKPFQCRICMRNFSQGANLSRHLRTHTGEKPFQCRICMRNFSRRDNLLRHLKTHLRGS

SEQ ID NO: 1506 - protein, 176 aa, synthetic construct
SRPGERPFQCRICMRNFSDRSSLKRHLRTHTGEKPFQCRICMRNFSQSNSLNAHLKTHTGSQKPFQCRICMRNFSRVDHLHRHLRTHTGEKPFQCRICMRNFSRSHTLTSHLKTHTGSQKPFQCRICMRNFSTPQVLRRHTRTHTGEKPFQCRICMRNFSQGGTLNRHLRTHLRGS

SEQ ID NO: 1507 - protein, 179 aa, synthetic construct
SRPGERPFQCRICMRNFSKKFNLQAHTRTHTGEKPFQCRICMRNFSDPSNLARHLRTHTGGGGSQKPFQCRICMRNFSQQTNLTRHLRTHTGEKPFQCRICMRNFSRVDNLPRHLKTHTGSQKPFQCRICMRNFSQSAHLKRHLRTHTGEKPFQCRICMRNFSRLDMLARHLKTHLRGS

SEQ ID NO: 1508 - protein, 176 aa, synthetic construct
SRPGERPFQCRICMRNFSRREHLVRHLRTHTGEKPFQCRICMRNFSDMGNLGRHLKTHTGSQKPFQCRICMRNFSRKHHLGRHTRTHTGEKPFQCRICMRNFSRREVLENHLRTHTGSQKPFQCRICMRNFSQSAHLKRHLRTHTGEKPFQCRICMRNFSLKHDLRRHLKTHLRGS

SEQ ID NO: 1509 - protein, 179 aa, synthetic construct
SRPGERPFQCRICMRNFSAKSGLSAHTRTHTGEKPFQCRICMRNFSEASNLTRHLRTHTGSQKPFQCRICMRNFSRKTHLQHHTRTHTGEKPFQCRICMRNFSREDNLGRHLRTHTGGGGSQKPFQCRICMRNFSRDDNLRTHLRTHTGEKPFQCRICMRNFSHGHRLKTHLKTHLRGS

SEQ ID NO: 1510 - protein, 179 aa, synthetic construct
SRPGERPFQCRICMRNFSQGGTLRRHLRTHTGEKPFQCRICMRNFSQTAHLQTHLKTHTGSQKPFQCRICMRNFSRPDNLARHLRTHTGEKPFQCRICMRNFSKRVSLEHHLKTHTGGGGSQKPFQCRICMRNFSRPSDLSVHTRTHTGEKPFQCRICMRNFSDHSSLKRHLRTHLRGS

SEQ ID NO: 1511 - protein, 179 aa, synthetic construct
SRPGERPFQCRICMRNFSVPSKLKRHTRTHTGEKPFQCRICMRNFSQRSDLTRHLRTHTGGGGSQKPFQCRICMRNFSTRDALTKHTRTHTGEKPFQCRICMRNFSRTDTLARHLRTHTGSQKPFQCRICMRNFSRPHNLLRHTRTHTGEKPFQCRICMRNFSRREVLENHLRTHLRGS

SEQ ID NO: 1512 - protein, 176 aa, synthetic construct
SRPGERPFQCRICMRNFSQRSDLTRHLRTHTGEKPFQCRICMRNFSRRDNLPKHLKTHTGSQKPFQCRICMRNFSRREHLVRHLRTHTGEKPFQCRICMRNFSDPSNLQRHLKTHTGSQKPFQCRICMRNFSKKDHLHRHTRTHTGEKPFQCRICMRNFSRREVLENHLRTHLRGS

SEQ ID NO: 1513 - protein, 176 aa, synthetic construct
SRPGERPFQCRICMRNFSQQQALKRHTRTHTGEKPFQCRICMRNFSVRHNLTRHLRTHTGSQKPFQCRICMRNFSDSSVLRRHLRTHTGEKPFQCRICMRNFSENSKLNRHLKTHTGSQKPFQCRICMRNFSRQDNLGRHLRTHTGEKPFQCRICMRNFSRRDSLPLHLKTHLRGS

SEQ ID NO: 1514 - protein, 179 aa, synthetic construct
SRPGERPFQCRICMRNFSKGNDLTRHTRTHTGEKPFQCRICMRNFSRREHLVRHLRTHTGSQKPFQCRICMRNFSRKEHLVGHLRTHTGEKPFQCRICMRNFSRGDNLNRHLKTHTGGGGSQKPFQCRICMRNFSSRQALKRHTRTHTGEKPFQCRICMRNFSQSGTLVRHLRTHLRGS

SEQ ID NO: 1515 - protein, 182 aa, synthetic construct
SRPGERPFQCRICMRNFSQSAHLKRHLRTHTGEKPFQCRICMRNFSRLDMLARHLKTHTGGGGSQKPFQCRICMRNFSKKCNLLSHTRTHTGEKPFQCRICMRNFSERGNLARHLRTHTGGGGSQKPFQCRICMRNFSQQTNLTRHLRTHTGEKPFQCRICMRNFSRVDNLPRHLKTHLRGS

SEQ ID NO: 1516 - protein, 176 aa, synthetic construct
SRPGERPFQCRICMRNFSDHSSLKRHLRTHTGEKPFQCRICMRNFSQSNTLRSHLKTHTGSQKPFQCRICMRNFSRVDHLHRHLRTHTGEKPFQCRICMRNFSRRYILQHHLKTHTGSQKPFQCRICMRNFSTPQVLRRHTRTHTGEKPFQCRICMRNFSQGGTLNRHLRTHLRGS

SEQ ID NO: 1517 - protein, 179 aa, synthetic construct
SRPGERPFQCRICMRNFSKKCNLLSHTRTHTGEKPFQCRICMRNFSERGNLARHLRTHTGGGGSQKPFQCRICMRNFSQGANLSRHLRTHTGEKPFQCRICMRNFSRRDNLLRHLKTHTGSQKPFQCRICMRNFSQSAHLKRHLRTHTGEKPFQCRICMRNFSRTDDLGRHLKTHLRGS

SEQ ID NO: 1518 - protein, 176 aa, synthetic construct
SRPGERPFQCRICMRNFSRREHLVRHLRTHTGEKPFQCRICMRNFSDMGNLGRHLKTHTGSQKPFQCRICMRNFSKKDHLHRHTRTHTGEKPFQCRICMRNFSRREVLENHLRTHTGSQKPFQCRICMRNFSQSAHLKRHLRTHTGEKPFQCRICMRNFSVGNSLSRHLKTHLRGS

SEQ ID NO: 1519 - protein, 179 aa, synthetic construct
SRPGERPFQCRICMRNFSGGAALAVHTRTHTGEKPFQCRICMRNFSDRSNLTRHLRTHTGSQKPFQCRICMRNFSRHEHLITHTRTHTGEKPFQCRICMRNFSRADNLGRHLRTHTGGGGSQKPFQCRICMRNFSRDDNLRTHLRTHTGEKPFQCRICMRNFSHGHRLKTHLKTHLRGS

SEQ ID NO: 1520 - protein, 179 aa, synthetic construct
SRPGERPFQCRICMRNFSQQTNLTRHLRTHTGEKPFQCRICMRNFSQKANLGVHLKTHTGSQKPFQCRICMRNFSTNSSLTRHLRTHTGEKPFQCRICMRNFSVVSNLRRHLKTHTGGGGSQKPFQCRICMRNFSKNNDLLKHTRTHTGEKPFQCRICMRNFSDHSSLKRHLRTHLRGS

SEQ ID NO: 1521 - protein, 179 aa, synthetic construct
SRPGERPFQCRICMRNFSSPSKLARHTRTHTGEKPFQCRICMRNFSVKETLTRHLRTHTGGGGSQKPFQCRICMRNFSTRDALTKHTRTHTGEKPFQCRICMRNFSRTDTLARHLRTHTGSQKPFQCRICMRNFSRQANLVRHTRTHTGEKPFQCRICMRNFSRIEILRNHLRTHLRGS

SEQ ID NO: 1522 - protein, 176 aa, synthetic construct
SRPGERPFQCRICMRNFSQRSDLTRHLRTHTGEKPFQCRICMRNFSRRDNLPKHLKTHTGSQKPFQCRICMRNFSRREHLVRHLRTHTGEKPFQCRICMRNFSDPSNLQRHLKTHTGSQKPFQCRICMRNFSRREHLVRHLRTHTGEKPFQCRICMRNFSRPDALPRHLKTHLRGS

SEQ ID NO: 1523 - protein, 176 aa, synthetic construct
SRPGERPFQCRICMRNFSQQQALTRHTRTHTGEKPFQCRICMRNFSLGHNLRRHLRTHTGSQKPFQCRICMRNFSDSSVLRRHLRTHTGEKPFQCRICMRNFSENSKLNRHLKTHTGSQKPFQCRICMRNFSRQDNLGRHLRTHTGEKPFQCRICMRNFSRSDTLPVHLKTHLRGS

SEQ ID NO: 1524 - protein, 179 aa, synthetic construct
SRPGERPFQCRICMRNFSKGNDLTRHTRTHTGEKPFQCRICMRNFSRREHLVRHLRTHTGSQKPFQCRICMRNFSRKEHLVGHLRTHTGEKPFQCRICMRNFSRGDNLNRHLKTHTGGGGSQKPFQCRICMRNFSQRSDLTRHLRTHTGEKPFQCRICMRNFSQGGTLRRHLKTHLRGS

SEQ ID NO: 1525 - protein, 182 aa, synthetic construct
SRPGERPFQCRICMRNFSQQTNLTRHLRTHTGEKPFQCRICMRNFSANRTLVHHLKTHTGGGGSQKPFQCRICMRNFSDRGNLTRHLRTHTGEKPFQCRICMRNFSRKTGLLIHLKTHTGGGGSQKPFQCRICMRNFSRRHILDRHTRTHTGEKPFQCRICMRNFSRQDNLGRHLRTHLRGS

SEQ ID NO: 1526 - protein, 176 aa, synthetic construct
SRPGERPFQCRICMRNFSDHSSLKRHLRTHTGEKPFQCRICMRNFSQSNTLRSHLKTHTGSQKPFQCRICMRNFSRVDHLHRHLRTHTGEKPFQCRICMRNFSRRYSLNNHLKTHTGSQKPFQCRICMRNFSTPQVLRRHTRTHTGEKPFQCRICMRNFSQGGTLNRHLRTHLRGS

SEQ ID NO: 1527 - protein, 179 aa, synthetic construct
SRPGERPFQCRICMRNFSKKFNLQAHTRTHTGEKPFQCRICMRNFSDPSNLARHLRTHTGGGGSQKPFQCRICMRNFSQHINLTRHLRTHTGEKPFQCRICMRNFSRRDNLLRHLKTHTGSQKPFQCRICMRNFSQSAHLKRHLRTHTGEKPFQCRICMRNFSRTDDLGRHLKTHLRGS

SEQ ID NO: 1528 - protein, 176 aa, synthetic construct
SRPGERPFQCRICMRNFSRVDHLHRHLRTHTGEKPFQCRICMRNFSQAATLQRHLKTHTGSQKPFQCRICMRNFSRKHHLGRHTRTHTGEKPFQCRICMRNFSRREVLENHLRTHTGSQKPFQCRICMRNFSQSAHLKRHLRTHTGEKPFQCRICMRNFSVGNSLSRHLKTHLRGS

SEQ ID NO: 1529 - protein, 179 aa, synthetic construct
SRPGERPFQCRICMRNFSGGAALAVHTRTHTGEKPFQCRICMRNFSDRSNLTRHLRTHTGSQKPFQCRICMRNFSRSAHLLNHTRTHTGEKPFQCRICMRNFSRQDNLGRHLRTHTGGGGSQKPFQCRICMRNFSRLDNLKTHLRTHTGEKPFQCRICMRNFSHGHRLKTHLKTHLRGS

SEQ ID NO: 1530 - protein, 179 aa, synthetic construct
SRPGERPFQCRICMRNFSQQTNLTRHLRTHTGEKPFQCRICMRNFSQKANLGVHLKTHTGSQKPFQCRICMRNFSTNSSLTRHLRTHTGEKPFQCRICMRNFSVVSNLRRHLKTHTGGGGSQKPFQCRICMRNFSKNNDLLKHTRTHTGEKPFQCRICMRNFSDISVLHRHLRTHLRGS

SEQ ID NO: 1531 - protein, 179 aa, synthetic construct
SRPGERPFQCRICMRNFSAPSKLLRHTRTHTGEKPFQCRICMRNFSLRDSLKRHLRTHTGGGGSQKPFQCRICMRNFSARDTLTKHTRTHTGEKPFQCRICMRNFSRTDTLARHLRTHTGSQKPFQCRICMRNFSRQDNLGRHLRTHTGEKPFQCRICMRNFSRLDVLAMHLKTHLRGS

SEQ ID NO: 1532 - protein, 176 aa, synthetic construct
SRPGERPFQCRICMRNFSQRSDLTRHLRTHTGEKPFQCRICMRNFSRRDNLPKHLKTHTGSQKPFQCRICMRNFSRQEHLVRHLRTHTGEKPFQCRICMRNFSEGGNLMRHLKTHTGSQKPFQCRICMRNFSRREHLVRHLRTHTGEKPFQCRICMRNFSRPDALPRHLKTHLRGS

SEQ ID NO: 1533 - protein, 179 aa, synthetic construct
SRPGERPFQCRICMRNFSRSNNLRLHTRTHTGEKPFQCRICMRNFSDSSVLRRHLRTHTGSQKPFQCRICMRNFSVPSKLKRHTRTHTGEKPFQCRICMRNFSRDDTLVRHLRTHTGGGGSQKPFQCRICMRNFSHKHVLDCHTRTHTGEKPFQCRICMRNFSQKPNLSRHLRTHLRGS

SEQ ID NO: 1534 - protein, 179 aa, synthetic construct
SRPGERPFQCRICMRNFSKGNDLTRHTRTHTGEKPFQCRICMRNFSRREHLVRHLRTHTGGGGSQKPFQCRICMRNFSRNFILQRHTRTHTGEKPFQCRICMRNFSQSAHLKRHLRTHTGSQKPFQCRICMRNFSSRQALKRHTRTHTGEKPFQCRICMRNFSQSGTLVRHLRTHLRGS

SEQ ID NO: 1535 - protein, 182 aa, synthetic construct
SRPGERPFQCRICMRNFSQQTNLTRHLRTHTGEKPFQCRICMRNFSANRTLVHHLKTHTGGGGSQKPFQCRICMRNFSDGSNLRRHLRTHTGEKPFQCRICMRNFSRIDNLDGHLKTHTGGGGSQKPFQCRICMRNFSRRAVLDRHTRTHTGEKPFQCRICMRNFSRQDNLGRHLRTHLRGS

SEQ ID NO: 1536 - protein, 176 aa, synthetic construct
SRPGERPFQCRICMRNFSDHSSLKRHLRTHTGEKPFQCRICMRNFSQSNTLRSHLKTHTGSQKPFQCRICMRNFSRVDHLHRHLRTHTGEKPFQCRICMRNFSRRYILQHHLKTHTGSQKPFQCRICMRNFSTNLTLVRHTRTHTGEKPFQCRICMRNFSQGGTLNRHLRTHLRGS

SEQ ID NO: 1537 - protein, 179 aa, synthetic construct
SRPGERPFQCRICMRNFSKKCNLLSHTRTHTGEKPFQCRICMRNFSERGNLARHLRTHTGGGGSQKPFQCRICMRNFSQHINLTRHLRTHTGEKPFQCRICMRNFSRRDNLLRHLKTHTGSQKPFQCRICMRNFSQSAHLKRHLRTHTGEKPFQCRICMRNFSRTDDLGRHLKTHLRGS

SEQ ID NO: 1538 - protein, 179 aa, synthetic construct
SRPGERPFQCRICMRNFSQKENLQVHLRTHTGEKPFQCRICMRNFSRRWGLGRHLKTHTGSQKPFQCRICMRNFSGASALRQHTRTHTGEKPFQCRICMRNFSQQTNLTRHLRTHTGGGGSQKPFQCRICMRNFSGRTALRNHTRTHTGEKPFQCRICMRNFSQSAHLKRHLRTHLRGS

SEQ ID NO: 1539 - protein, 179 aa, synthetic construct
SRPGERPFQCRICMRNFSGGAALAVHTRTHTGEKPFQCRICMRNFSDRSNLTRHLRTHTGSQKPFQCRICMRNFSRKTHLQHHTRTHTGEKPFQCRICMRNFSREDNLGRHLRTHTGGGGSQKPFQCRICMRNFSRDDNLRTHLRTHTGEKPFQCRICMRNFSHGHRLKTHLKTHLRGS

SEQ ID NO: 1540 - protein, 179 aa, synthetic construct
SRPGERPFQCRICMRNFSQQTNLTRHLRTHTGEKPFQCRICMRNFSQKANLGVHLKTHTGSQKPFQCRICMRNFSHESSLRRHLRTHTGEKPFQCRICMRNFSISHNLARHLKTHTGGGGSQKPFQCRICMRNFSKNNDLLKHTRTHTGEKPFQCRICMRNFSDHSSLKRHLRTHLRGS

SEQ ID NO: 1541 - protein, 179 aa, synthetic construct
SRPGERPFQCRICMRNFSVPSKLKRHTRTHTGEKPFQCRICMRNFSQRSDLTRHLRTHTGGGGSQKPFQCRICMRNFSTRDALTKHTRTHTGEKPFQCRICMRNFSRTDTLARHLRTHTGSQKPFQCRICMRNFSRQDNLGRHLRTHTGEKPFQCRICMRNFSRLDVLAMHLKTHLRGS

SEQ ID NO: 1542 - protein, 176 aa, synthetic construct
SRPGERPFQCRICMRNFSQRSDLTRHLRTHTGEKPFQCRICMRNFSRRDGLNGHLKTHTGSQKPFQCRICMRNFSRQEHLVRHLRTHTGEKPFQCRICMRNFSEGGNLMRHLKTHTGSQKPFQCRICMRNFSRREHLVRHLRTHTGEKPFQCRICMRNFSRPDALPRHLKTHLRGS

SEQ ID NO: 1543 - protein, 179 aa, synthetic construct
SRPGERPFQCRICMRNFSRSNNLRLHTRTHTGEKPFQCRICMRNFSDSSVLRRHLRTHTGSQKPFQCRICMRNFSLKGHLTRHLRTHTGEKPFQCRICMRNFSRLDMLARHLKTHTGGGGSQKPFQCRICMRNFSYKHVLHSHTRTHTGEKPFQCRICMRNFSQTANLMRHLRTHLRGS

SEQ ID NO: 1544 - protein, 182 aa, synthetic construct
SRPGERPFQCRICMRNFSQQTNLTRHLRTHTGEKPFQCRICMRNFSANRTLVHHLKTHTGGGGSQKPFQCRICMRNFSDRGNLTRHLRTHTGEKPFQCRICMRNFSRKTGLLIHLKTHTGGGGSQKPFQCRICMRNFSRRAVLDRHTRTHTGEKPFQCRICMRNFSRQDNLGRHLRTHLRGS

SEQ ID NO: 1545 - protein, 176 aa, synthetic construct
SRPGERPFQCRICMRNFSDHSSLKRHLRTHTGEKPFQCRICMRNFSQSNTLSDHLKTHTGSQKPFQCRICMRNFSRVDHLHRHLRTHTGEKPFQCRICMRNFSRSHTLTSHLKTHTGSQKPFQCRICMRNFSAKLSLTRHTRTHTGEKPFQCRICMRNFSQSTTLKRHLRTHLRGS

SEQ ID NO: 1546 - protein, 179 aa, synthetic construct
SRPGERPFQCRICMRNFSKKCNLLSHTRTHTGEKPFQCRICMRNFSERGNLARHLRTHTGGGGSQKPFQCRICMRNFSQQTNLTRHLRTHTGEKPFQCRICMRNFSRVDNLPRHLKTHTGSQKPFQCRICMRNFSQSAHLKRHLRTHTGEKPFQCRICMRNFSRTDDLGRHLKTHLRGS

SEQ ID NO: 1547 - protein, 179 aa, synthetic construct
SRPGERPFQCRICMRNFSQKSNLTTHLRTHTGEKPFQCRICMRNFSRRHGLGRHLKTHTGSQKPFQCRICMRNFSGASALRQHTRTHTGEKPFQCRICMRNFSQQTNLTRHLRTHTGGGGSQKPFQCRICMRNFSGRTALRNHTRTHTGEKPFQCRICMRNFSQSAHLKRHLRTHLRGS

SEQ ID NO: 1548 - protein, 179 aa, synthetic construct
SRPGERPFQCRICMRNFSGMLSLAVHTRTHTGEKPFQCRICMRNFSDASNLRRHLRTHTGSQKPFQCRICMRNFSRKTHLQHHTRTHTGEKPFQCRICMRNFSREDNLGRHLRTHTGGGGSQKPFQCRICMRNFSRDDNLRTHLRTHTGEKPFQCRICMRNFSHGHRLKTHLKTHLRGS

SEQ ID NO: 1549 - protein, 179 aa, synthetic construct
SRPGERPFQCRICMRNFSQKVNLARHLRTHTGEKPFQCRICMRNFSQQGNLQLHLKTHTGSQKPFQCRICMRNFSTNSSLTRHLRTHTGEKPFQCRICMRNFSISHNLARHLKTHTGGGGSQKPFQCRICMRNFSKNNDLLKHTRTHTGEKPFQCRICMRNFSDHSSLKRHLRTHLRGS

SEQ ID NO: 1550 - protein, 179 aa, synthetic construct
SRPGERPFQCRICMRNFSAPSKLLRHTRTHTGEKPFQCRICMRNFSLRDSLKRHLRTHTGGGGSQKPFQCRICMRNFSKNNDLLKHTRTHTGEKPFQCRICMRNFSRTDTLARHLRTHTGSQKPFQCRICMRNFSRQANLVRHTRTHTGEKPFQCRICMRNFSRIEILRNHLRTHLRGS

SEQ ID NO: 1551 - protein, 176 aa, synthetic construct
SRPGERPFQCRICMRNFSQRSDLTRHLRTHTGEKPFQCRICMRNFSRVDGLGHHLKTHTGSQKPFQCRICMRNFSRREHLVRHLRTHTGEKPFQCRICMRNFSDPSNLQRHLKTHTGSQKPFQCRICMRNFSRREHLVRHLRTHTGEKPFQCRICMRNFSRPDALPRHLKTHLRGS

SEQ ID NO: 1552 - protein, 179 aa, synthetic construct
SRPGERPFQCRICMRNFSRSNNLRLHTRTHTGEKPFQCRICMRNFSDSSVLRRHLRTHTGSQKPFQCRICMRNFSAPSKLMRHTRTHTGEKPFQCRICMRNFSRMDTLGRHLRTHTGGGGSQKPFQCRICMRNFSYKHVLVNHTRTHTGEKPFQCRICMRNFSQMSNLDRHLRTHLRGS

SEQ ID NO: 1553 - protein, 176 aa, synthetic construct
SRPGERPFQCRICMRNFSLREPLDRHTRTHTGEKPFQCRICMRNFSDSSVLRRHLRTHTGSQKPFQCRICMRNFSQKCNLQAHLRTHTGEKPFQCRICMRNFSMNHHLKAHLKTHTGSQKPFQCRICMRNFSQREHLNVHLRTHTGEKPFQCRICMRNFSVGSNLTRHLKTHLRGS

SEQ ID NO: 1554 - protein, 176 aa, synthetic construct
SRPGERPFQCRICMRNFSDRSSLKRHLRTHTGEKPFQCRICMRNFSQSNSLNAHLKTHTGSQKPFQCRICMRNFSRVDHLHRHLRTHTGEKPFQCRICMRNFSRSHTLTSHLKTHTGSQKPFQCRICMRNFSTNLTLVRHTRTHTGEKPFQCRICMRNFSQGGTLNRHLRTHLRGS

SEQ ID NO: 1555 - protein, 179 aa, synthetic construct
SRPGERPFQCRICMRNFSKKFNLQAHTRTHTGEKPFQCRICMRNFSDNSNLARHLRTHTGGGGSQKPFQCRICMRNFSQQTNLTRHLRTHTGEKPFQCRICMRNFSRVDNLPRHLKTHTGSQKPFQCRICMRNFSQSAHLKRHLRTHTGEKPFQCRICMRNFSREDSLPRHLKTHLRGS

SEQ ID NO: 1556 - protein, 179 aa, synthetic construct
SRPGERPFQCRICMRNFSQKENLQVHLRTHTGEKPFQCRICMRNFSRRWGLGRHLKTHTGSQKPFQCRICMRNFSGASALRQHTRTHTGEKPFQCRICMRNFSQQTNLTRHLRTHTGGGGSQKPFQCRICMRNFSGGTALRMHTRTHTGEKPFQCRICMRNFSQSAHLKRHLRTHLRGS

SEQ ID NO: 1557 - protein, 179 aa, synthetic construct
SRPGERPFQCRICMRNFSAKSGLSAHTRTHTGEKPFQCRICMRNFSEASNLTRHLRTHTGSQKPFQCRICMRNFSRHEHLITHTRTHTGEKPFQCRICMRNFSRADNLGRHLRTHTGGGGSQKPFQCRICMRNFSRDDNLRTHLRTHTGEKPFQCRICMRNFSHGHRLKTHLKTHLRGS

SEQ ID NO: 1558 - protein, 179 aa, synthetic construct
SRPGERPFQCRICMRNFSQNANLARHLRTHTGEKPFQCRICMRNFSQKANLGVHLKTHTGSQKPFQCRICMRNFSTNSSLTRHLRTHTGEKPFQCRICMRNFSISHNLARHLKTHTGGGGSQKPFQCRICMRNFSKNNDLLKHTRTHTGEKPFQCRICMRNFSDHSSLKRHLRTHLRGS

SEQ ID NO: 1559 - protein, 179 aa, synthetic construct
SRPGERPFQCRICMRNFSVPSKLKRHTRTHTGEKPFQCRICMRNFSQRSDLTRHLRTHTGGGGSQKPFQCRICMRNFSKNNDLLKHTRTHTGEKPFQCRICMRNFSRTDTLARHLRTHTGSQKPFQCRICMRNFSRPHNLLRHTRTHTGEKPFQCRICMRNFSRREVLENHLRTHLRGS

SEQ ID NO: 1560 - protein, 176 aa, synthetic construct
SRPGERPFQCRICMRNFSQRSDLTRHLRTHTGEKPFQCRICMRNFSRRDGLNGHLKTHTGSQKPFQCRICMRNFSRREHLVRHLRTHTGEKPFQCRICMRNFSDPSNLQRHLKTHTGSQKPFQCRICMRNFSRREHLVRHLRTHTGEKPFQCRICMRNFSRPDALPRHLKTHLRGS

SEQ ID NO: 1561 - protein, 179 aa, synthetic construct
SRPGERPFQCRICMRNFSRSNNLRLHTRTHTGEKPFQCRICMRNFSDSSVLRRHLRTHTGSQKPFQCRICMRNFSLKGHLTRHLRTHTGEKPFQCRICMRNFSRLDMLARHLKTHTGGGGSQKPFQCRICMRNFSYKHVLVNHTRTHTGEKPFQCRICMRNFSQMSNLDRHLRTHLRGS

SEQ ID NO: 1562 - DNA, 112 bp, synthetic construct
  source 1..112: mol_type = other DNA
ggccacggagcgagacatctgtttaagagctaagctggaaacagcatagcaagtttaaataaggctagtccgttatcaacttgaaaaagtggcaccgagtcggtgctttttt

SEQ ID NO: 1563 - DNA, 112 bp, synthetic construct
  source 1..112: mol_type = other DNA
agaggaaggaccagagcggggtttaagagctaagctggaaacagcatagcaagtttaaataaggctagtccgttatcaacttgaaaaagtggcaccgagtcggtgctttttt

SEQ ID NO: 1564 - DNA, 112 bp, synthetic construct
  source 1..112: mol_type = other DNA
catcggcgccctccgatctggtttaagagctaagctggaaacagcatagcaagtttaaataaggctagtccgttatcaacttgaaaaagtggcaccgagtcggtgctttttt

SEQ ID NO: 1565 - DNA, 112 bp, synthetic construct
  source 1..112: mol_type = other DNA
ctcccgtcgccgtaggccaagtttaagagctaagctggaaacagcatagcaagtttaaataaggctagtccgttatcaacttgaaaaagtggcaccgagtcggtgctttttt

SEQ ID NO: 1566 - DNA, 112 bp, synthetic construct
  source 1..112: mol_type = other DNA
gagacaggtgacggtccctggtttaagagctaagctggaaacagcatagcaagtttaaataaggctagtccgttatcaacttgaaaaagtggcaccgagtcggtgctttttt

SEQ ID NO: 1567 - DNA, 112 bp, synthetic construct
  source 1..112: mol_type = other DNA
tcccctgctccccgccgaaagtttaagagctaagctggaaacagcatagcaagtttaaataaggctagtccgttatcaacttgaaaaagtggcaccgagtcggtgctttttt

SEQ ID NO: 1568 - DNA, 112 bp, synthetic construct
  source 1..112: mol_type = other DNA
gggccttgtcctgattggctgtttaagagctaagctggaaacagcatagcaagtttaaataaggctagtccgttatcaacttgaaaaagtggcaccgagtcggtgctttttt

SEQ ID NO: 1569 - DNA, 112 bp, synthetic construct
  source 1..112: mol_type = other DNA
ggggccagtctgcaaagcgagtttaagagctaagctggaaacagcatagcaagtttaaataaggctagtccgttatcaacttgaaaaagtggcaccgagtcggtgctttttt

SEQ ID NO: 1570 - DNA, 112 bp, synthetic construct
  source 1..112: mol_type = other DNA
aagaaggcatgcactagactgtttaagagctaagctggaaacagcatagcaagtttaaataaggctagtccgttatcaacttgaaaaagtggcaccgagtcggtgctttttt

SEQ ID NO: 1571 - DNA, 112 bp, synthetic construct
  source 1..112: mol_type = other DNA
gagtagcgcgagcacagctagtttaagagctaagctggaaacagcatagcaagtttaaataaggctagtccgttatcaacttgaaaaagtggcaccgagtcggtgctttttt

SEQ ID NO: 1572 - DNA, 112 bp, synthetic construct
  source 1..112: mol_type = other DNA
ggaggggcgcttggggtctggtttaagagctaagctggaaacagcatagcaagtttaaataaggctagtccgttatcaacttgaaaaagtggcaccgagtcggtgctttttt

SEQ ID NO: 1573 - DNA, 112 bp, synthetic construct
  source 1..112: mol_type = other DNA
cacatagacccagaggtgctgtttaagagctaagctggaaacagcatagcaagtttaaataaggctagtccgttatcaacttgaaaaagtggcaccgagtcggtgctttttt

SEQ ID NO: 1574 - DNA, 112 bp, synthetic construct
  source 1..112: mol_type = other DNA
cagcttgggaattccctgcagtttaagagctaagctggaaacagcatagcaagtttaaataaggctagtccgttatcaacttgaaaaagtggcaccgagtcggtgctttttt

SEQ ID NO: 1575 - DNA, 112 bp, synthetic construct
  source 1..112: mol_type = other DNA
tgccccctcgctttgcagacgtttaagagctaagctggaaacagcatagcaagtttaaataaggctagtccgttatcaacttgaaaaagtggcaccgagtcggtgctttttt

SEQ ID NO: 1576 - DNA, 112 bp, synthetic construct
  source 1..112: mol_type = other DNA
gtcccaaaggcgcggcgctggtttaagagctaagctggaaacagcatagcaagtttaaataaggctagtccgttatcaacttgaaaaagtggcaccgagtcggtgctttttt

SEQ ID NO: 1577 - DNA, 112 bp, synthetic construct
  source 1..112: mol_type = other DNA
cccgaccctcccgtcgccgtgtttaagagctaagctggaaacagcatagcaagtttaaataaggctagtccgttatcaacttgaaaaagtggcaccgagtcggtgctttttt

SEQ ID NO: 1578 - DNA, 112 bp, synthetic construct
  source 1..112: mol_type = other DNA
agggctggatctcggggaaggtttaagagctaagctggaaacagcatagcaagtttaaataaggctagtccgttatcaacttgaaaaagtggcaccgagtcggtgctttttt

SEQ ID NO: 1579 - DNA, 112 bp, synthetic construct
  source 1..112: mol_type = other DNA
taagaaggcatgcactagacgtttaagagctaagctggaaacagcatagcaagtttaaataaggctagtccgttatcaacttgaaaaagtggcaccgagtcggtgctttttt

SEQ ID NO: 1580 - DNA, 112 bp, synthetic construct
  source 1..112: mol_type = other DNA
gatgctaagtgacttgctaagtttaagagctaagctggaaacagcatagcaagtttaaataaggctagtccgttatcaacttgaaaaagtggcaccgagtcggtgctttttt

SEQ ID NO: 1581 - DNA, 112 bp, synthetic construct
  source 1..112: mol_type = other DNA
tggggccagtctgcaaagcggtttaagagctaagctggaaacagcatagcaagtttaaataaggctagtccgttatcaacttgaaaaagtggcaccgagtcggtgctttttt

SEQ ID NO: 1582 - DNA, 112 bp, synthetic construct
  source 1..112: mol_type = other DNA
agagcgccgaggttgggggagtttaagagctaagctggaaacagcatagcaagtttaaataaggctagtccgttatcaacttgaaaaagtggcaccgagtcggtgctttttt

SEQ ID NO: 1583 - DNA, 112 bp, synthetic construct
  source 1..112: mol_type = other DNA
caagtcacttagcatctctggtttaagagctaagctggaaacagcatagcaagtttaaataaggctagtccgttatcaacttgaaaaagtggcaccgagtcggtgctttttt

SEQ ID NO: 1584 - DNA, 112 bp, synthetic construct
  source 1..112: mol_type = other DNA
cccgccgtggggctagtccagtttaagagctaagctggaaacagcatagcaagtttaaataaggctagtccgttatcaacttgaaaaagtggcaccgagtcggtgctttttt

SEQ ID NO: 1585 - DNA, 112 bp, synthetic construct
  source 1..112: mol_type = other DNA
tggggtgcgcgccccagcttgtttaagagctaagctggaaacagcatagcaagtttaaataaggctagtccgttatcaacttgaaaaagtggcaccgagtcggtgctttttt

SEQ ID NO: 1586 - DNA, 112 bp, synthetic construct
  source 1..112: mol_type = other DNA
ttcaggctggaggcacattagtttaagagctaagctggaaacagcatagcaagtttaaataaggctagtccgttatcaacttgaaaaagtggcaccgagtcggtgctttttt

SEQ ID NO: 1587 - DNA, 112 bp, synthetic construct
  source 1..112: mol_type = other DNA
ctcccccagcgcagctggaggtttaagagctaagctggaaacagcatagcaagtttaaataaggctagtccgttatcaacttgaaaaagtggcaccgagtcggtgctttttt

SEQ ID NO: 1588 - DNA, 112 bp, synthetic construct
  source 1..112: mol_type = other DNA
tagtccagggctggatctcggtttaagagctaagctggaaacagcatagcaagtttaaataaggctagtccgttatcaacttgaaaaagtggcaccgagtcggtgctttttt

SEQ ID NO: 1589 - DNA, 112 bp, synthetic construct
  source 1..112: mol_type = other DNA
ccagccctggactagccccagtttaagagctaagctggaaacagcatagcaagtttaaataaggctagtccgttatcaacttgaaaaagtggcaccgagtcggtgctttttt

SEQ ID NO: 1590 - DNA, 112 bp, synthetic construct
  source 1..112: mol_type = other DNA
ggccagtctgcaaagcgagggtttaagagctaagctggaaacagcatagcaagtttaaataaggctagtccgttatcaacttgaaaaagtggcaccgagtcggtgctttttt

SEQ ID NO: 1591 - DNA, 112 bp, synthetic construct
  source 1..112: mol_type = other DNA
atctcggggaagcggcgggggtttaagagctaagctggaaacagcatagcaagtttaaataaggctagtccgttatcaacttgaaaaagtggcaccgagtcggtgctttttt

SEQ ID NO: 1592 - DNA, 112 bp, synthetic construct
  source 1..112: mol_type = other DNA
ggcgcgcaccccagatcggagtttaagagctaagctggaaacagcatagcaagtttaaataaggctagtccgttatcaacttgaaaaagtggcaccgagtcggtgctttttt

SEQ ID NO: 1593 - DNA, 112 bp, synthetic construct
  source 1..112: mol_type = other DNA
gagtctcgtgatgtttaagagtttaagagctaagctggaaacagcatagcaagtttaaataaggctagtccgttatcaacttgaaaaagtggcaccgagtcggtgctttttt

SEQ ID NO: 1594 - DNA, 112 bp, synthetic construct
  source 1..112: mol_type = other DNA
cacgcgtttaatataagtgggtttaagagctaagctggaaacagcatagcaagtttaaataaggctagtccgttatcaacttgaaaaagtggcaccgagtcggtgctttttt

SEQ ID NO: 1595 - DNA, 112 bp, synthetic construct
  source 1..112: mol_type = other DNA
ccccactccagctgcgctgggtttaagagctaagctggaaacagcatagcaagtttaaataaggctagtccgttatcaacttgaaaaagtggcaccgagtcggtgctttttt

SEQ ID NO: 1596 - DNA, 112 bp, synthetic construct
  source 1..112: mol_type = other DNA
ctttggcctacggcgacggggtttaagagctaagctggaaacagcatagcaagtttaaataaggctagtccgttatcaacttgaaaaagtggcaccgagtcggtgctttttt

SEQ ID NO: 1597 - DNA, 112 bp, synthetic construct
  source 1..112: mol_type = other DNA
caatcaggacaaggcccgcagtttaagagctaagctggaaacagcatagcaagtttaaataaggctagtccgttatcaacttgaaaaagtggcaccgagtcggtgctttttt

SEQ ID NO: 1598 - DNA, 112 bp, synthetic construct
  source 1..112: mol_type = other DNA
ttcgcatgtcctagcacctcgtttaagagctaagctggaaacagcatagcaagtttaaataaggctagtccgttatcaacttgaaaaagtggcaccgagtcggtgctttttt

SEQ ID NO: 1599 - DNA, 112 bp, synthetic construct
  source 1..112: mol_type = other DNA
gctggcttggagacaggtgagtttaagagctaagctggaaacagcatagcaagtttaaataaggctagtccgttatcaacttgaaaaagtggcaccgagtcggtgctttttt

SEQ ID NO: 1600 - DNA, 112 bp, synthetic construct
  source 1..112: mol_type = other DNA
gcgcagctggagtgggggacgtttaagagctaagctggaaacagcatagcaagtttaaataaggctagtccgttatcaacttgaaaaagtggcaccgagtcggtgctttttt

SEQ ID NO: 1601 - DNA, 112 bp, synthetic construct
  source 1..112: mol_type = other DNA
aaggaccagagcgggagggtgtttaagagctaagctggaaacagcatagcaagtttaaataaggctagtccgttatcaacttgaaaaagtggcaccgagtcggtgctttttt

SEQ ID NO: 1602 - DNA, 112 bp, synthetic construct
  source 1..112: mol_type = other DNA
gcctacggcgacgggagggtgtttaagagctaagctggaaacagcatagcaagtttaaataaggctagtccgttatcaacttgaaaaagtggcaccgagtcggtgctttttt

SEQ ID NO: 1603 - DNA, 112 bp, synthetic construct
  source 1..112: mol_type = other DNA
gggccacagagggtgcagaggtttaagagctaagctggaaacagcatagcaagtttaaataaggctagtccgttatcaacttgaaaaagtggcaccgagtcggtgctttttt

SEQ ID NO: 1604 - DNA, 112 bp, synthetic construct
  source 1..112: mol_type = other DNA
cgcgacgtttgtagaatgctgtttaagagctaagctggaaacagcatagcaagtttaaataaggctagtccgttatcaacttgaaaaagtggcaccgagtcggtgctttttt

SEQ ID NO: 1605 - DNA, 112 bp, synthetic construct
  source 1..112: mol_type = other DNA
gcgctacttgcccctttcgggtttaagagctaagctggaaacagcatagcaagtttaaataaggctagtccgttatcaacttgaaaaagtggcaccgagtcggtgctttttt

SEQ ID NO: 1606 - DNA, 112 bp, synthetic construct
  source 1..112: mol_type = other DNA
gtgcccagccaatcaggacagtttaagagctaagctggaaacagcatagcaagtttaaataaggctagtccgttatcaacttgaaaaagtggcaccgagtcggtgctttttt

SEQ ID NO: 1607 - DNA, 112 bp, synthetic construct
  source 1..112: mol_type = other DNA
agcgtcagagcgccgaggttgtttaagagctaagctggaaacagcatagcaagtttaaataaggctagtccgttatcaacttgaaaaagtggcaccgagtcggtgctttttt

SEQ ID NO: 1608 - DNA, 112 bp, synthetic construct
  source 1..112: mol_type = other DNA
cgcgccccagcttgggacacgtttaagagctaagctggaaacagcatagcaagtttaaataaggctagtccgttatcaacttgaaaaagtggcaccgagtcggtgctttttt

SEQ ID NO: 1609 - DNA, 112 bp, synthetic construct
  source 1..112: mol_type = other DNA
gcgcccggtgtcccaagctggtttaagagctaagctggaaacagcatagcaagtttaaataaggctagtccgttatcaacttgaaaaagtggcaccgagtcggtgctttttt

SEQ ID NO: 1610 - DNA, 112 bp, synthetic construct
  source 1..112: mol_type = other DNA
caagccagcgacgcagtgccgtttaagagctaagctggaaacagcatagcaagtttaaataaggctagtccgttatcaacttgaaaaagtggcaccgagtcggtgctttttt

SEQ ID NO: 1611 - DNA, 112 bp, synthetic construct
  source 1..112: mol_type = other DNA
agcgcagctggagtgggggagtttaagagctaagctggaaacagcatagcaagtttaaataaggctagtccgttatcaacttgaaaaagtggcaccgagtcggtgctttttt

SEQ ID NO: 1612 - DNA, 112 bp, synthetic construct
  source 1..112: mol_type = other DNA
gcttccccgagatccagcccgtttaagagctaagctggaaacagcatagcaagtttaaataaggctagtccgttatcaacttgaaaaagtggcaccgagtcggtgctttttt

SEQ ID NO: 1613 - DNA, 112 bp, synthetic construct
  source 1..112: mol_type = other DNA
aacgcgtggaggggcgcttggtttaagagctaagctggaaacagcatagcaagtttaaataaggctagtccgttatcaacttgaaaaagtggcaccgagtcggtgctttttt

SEQ ID NO: 1614 - DNA, 112 bp, synthetic construct
  source 1..112: mol_type = other DNA
agacaggtgacggtccctgcgtttaagagctaagctggaaacagcatagcaagtttaaataaggctagtccgttatcaacttgaaaaagtggcaccgagtcggtgctttttt

SEQ ID NO: 1615 - DNA, 112 bp, synthetic construct
  source 1..112: mol_type = other DNA
agtggaggcgtcgcgctggcgtttaagagctaagctggaaacagcatagcaagtttaaataaggctagtccgttatcaacttgaaaaagtggcaccgagtcggtgctttttt

SEQ ID NO: 1616 - DNA, 112 bp, synthetic construct
  source 1..112: mol_type = other DNA
gagaatggagaaaccctgcagtttaagagctaagctggaaacagcatagcaagtttaaataaggctagtccgttatcaacttgaaaaagtggcaccgagtcggtgctttttt

SEQ ID NO: 1617 - DNA, 112 bp, synthetic construct
  source 1..112: mol_type = other DNA
caggggagacctttggcctagtttaagagctaagctggaaacagcatagcaagtttaaataaggctagtccgttatcaacttgaaaaagtggcaccgagtcggtgctttttt

SEQ ID NO: 1618 - DNA, 112 bp, synthetic construct
  source 1..112: mol_type = other DNA
ccccagcgcagctggagtgggtttaagagctaagctggaaacagcatagcaagtttaaataaggctagtccgttatcaacttgaaaaagtggcaccgagtcggtgctttttt

SEQ ID NO: 1619 - DNA, 112 bp, synthetic construct
  source 1..112: mol_type = other DNA
agacctttggcctacggcgagtttaagagctaagctggaaacagcatagcaagtttaaataaggctagtccgttatcaacttgaaaaagtggcaccgagtcggtgctttttt

SEQ ID NO: 1620 - DNA, 112 bp, synthetic construct
  source 1..112: mol_type = other DNA
cgtcagagcgccgaggttgggtttaagagctaagctggaaacagcatagcaagtttaaataaggctagtccgttatcaacttgaaaaagtggcaccgagtcggtgctttttt

SEQ ID NO: 1621 - DNA, 112 bp, synthetic construct
  source 1..112: mol_type = other DNA
caccaaggagaacttggagagtttaagagctaagctggaaacagcatagcaagtttaaataaggctagtccgttatcaacttgaaaaagtggcaccgagtcggtgctttttt

SEQ ID NO: 1622 - DNA, 112 bp, synthetic construct
  source 1..112: mol_type = other DNA
cggggagcaggggagaccttgtttaagagctaagctggaaacagcatagcaagtttaaataaggctagtccgttatcaacttgaaaaagtggcaccgagtcggtgctttttt

SEQ ID NO: 1623 - DNA, 112 bp, synthetic construct
  source 1..112: mol_type = other DNA
atagtcccaaaagcatcctggtttaagagctaagctggaaacagcatagcaagtttaaataaggctagtccgttatcaacttgaaaaagtggcaccgagtcggtgctttttt

SEQ ID NO: 1624 - DNA, 112 bp, synthetic construct
  source 1..112: mol_type = other DNA
cccctgctccccgccgaaaggtttaagagctaagctggaaacagcatagcaagtttaaataaggctagtccgttatcaacttgaaaaagtggcaccgagtcggtgctttttt

SEQ ID NO: 1625 - DNA, 112 bp, synthetic construct
  source 1..112: mol_type = other DNA
tgagtttgctgtctgtacatgtttaagagctaagctggaaacagcatagcaagtttaaataaggctagtccgttatcaacttgaaaaagtggcaccgagtcggtgctttttt

SEQ ID NO: 1626 - DNA, 112 bp, synthetic construct
  source 1..112: mol_type = other DNA
tgcgtcgctggcttggagacgtttaagagctaagctggaaacagcatagcaagtttaaataaggctagtccgttatcaacttgaaaaagtggcaccgagtcggtgctttttt

SEQ ID NO: 1627 - DNA, 112 bp, synthetic construct
  source 1..112: mol_type = other DNA
gggtgcagagcgggagaggagtttaagagctaagctggaaacagcatagcaagtttaaataaggctagtccgttatcaacttgaaaaagtggcaccgagtcggtgctttttt

SEQ ID NO: 1628 - DNA, 112 bp, synthetic construct
  source 1..112: mol_type = other DNA
tgtggggccacaccgtgggggtttaagagctaagctggaaacagcatagcaagtttaaataaggctagtccgttatcaacttgaaaaagtggcaccgagtcggtgctttttt

SEQ ID NO: 1629 - DNA, 112 bp, synthetic construct
  source 1..112: mol_type = other DNA
ggccacagagggtgcagagcgtttaagagctaagctggaaacagcatagcaagtttaaataaggctagtccgttatcaacttgaaaaagtggcaccgagtcggtgctttttt

SEQ ID NO: 1630 - DNA, 112 bp, synthetic construct
  source 1..112: mol_type = other DNA
ttcctgaagctgacagcattgtttaagagctaagctggaaacagcatagcaagtttaaataaggctagtccgttatcaacttgaaaaagtggcaccgagtcggtgctttttt

SEQ ID NO: 1631 - DNA, 112 bp, synthetic construct
  source 1..112: mol_type = other DNA
tcctgaggacagctcagagagtttaagagctaagctggaaacagcatagcaagtttaaataaggctagtccgttatcaacttgaaaaagtggcaccgagtcggtgctttttt

SEQ ID NO: 1632 - DNA, 112 bp, synthetic construct
  source 1..112: mol_type = other DNA
tagcacctctgggtctatgtgtttaagagctaagctggaaacagcatagcaagtttaaataaggctagtccgttatcaacttgaaaaagtggcaccgagtcggtgctttttt

SEQ ID NO: 1633 - DNA, 112 bp, synthetic construct
  source 1..112: mol_type = other DNA
aaacgcgtgcccagccaatcgtttaagagctaagctggaaacagcatagcaagtttaaataaggctagtccgttatcaacttgaaaaagtggcaccgagtcggtgctttttt

SEQ ID NO: 1634 - DNA, 112 bp, synthetic construct
  source 1..112: mol_type = other DNA
tggggaagggggtgcgcaccgtttaagagctaagctggaaacagcatagcaagtttaaataaggctagtccgttatcaacttgaaaaagtggcaccgagtcggtgctttttt

SEQ ID NO: 1635 - DNA, 112 bp, synthetic construct
  source 1..112: mol_type = other DNA
gaacgcgtggaggggcgcttgtttaagagctaagctggaaacagcatagcaagtttaaataaggctagtccgttatcaacttgaaaaagtggcaccgagtcggtgctttttt

SEQ ID NO: 1636 - DNA, 112 bp, synthetic construct
  source 1..112: mol_type = other DNA
ctagcacctctgggtctatggtttaagagctaagctggaaacagcatagcaagtttaaataaggctagtccgttatcaacttgaaaaagtggcaccgagtcggtgctttttt

SEQ ID NO: 1637 - DNA, 112 bp, synthetic construct
  source 1..112: mol_type = other DNA
ccgcagcagacaggcttaccgtttaagagctaagctggaaacagcatagcaagtttaaataaggctagtccgttatcaacttgaaaaagtggcaccgagtcggtgctttttt

SEQ ID NO: 1638 - DNA, 112 bp, synthetic construct
  source 1..112: mol_type = other DNA
tccgagcagttaactggctggtttaagagctaagctggaaacagcatagcaagtttaaataaggctagtccgttatcaacttgaaaaagtggcaccgagtcggtgctttttt

SEQ ID NO: 1639 - DNA, 112 bp, synthetic construct
  source 1..112: mol_type = other DNA
tacatcggcgccctccgatcgtttaagagctaagctggaaacagcatagcaagtttaaataaggctagtccgttatcaacttgaaaaagtggcaccgagtcggtgctttttt

SEQ ID NO: 1640 - DNA, 112 bp, synthetic construct
  source 1..112: mol_type = other DNA
ctcgcgctactctctctttcgtttaagagctaagctggaaacagcatagcaagtttaaataaggctagtccgttatcaacttgaaaaagtggcaccgagtcggtgctttttt

SEQ ID NO: 1641 - DNA, 112 bp, synthetic construct
  source 1..112: mol_type = other DNA
cagagcgccgaggttggggggtttaagagctaagctggaaacagcatagcaagtttaaataaggctagtccgttatcaacttgaaaaagtggcaccgagtcggtgctttttt

SEQ ID NO: 1642 - DNA, 112 bp, synthetic construct
  source 1..112: mol_type = other DNA
ctagtccagggctggatctcgtttaagagctaagctggaaacagcatagcaagtttaaataaggctagtccgttatcaacttgaaaaagtggcaccgagtcggtgctttttt

SEQ ID NO: 1643 - DNA, 112 bp, synthetic construct
  source 1..112: mol_type = other DNA
gcgtcagagcgccgaggttggtttaagagctaagctggaaacagcatagcaagtttaaataaggctagtccgttatcaacttgaaaaagtggcaccgagtcggtgctttttt

SEQ ID NO: 1644 - DNA, 112 bp, synthetic construct
  source 1..112: mol_type = other DNA
gtggaggggcgcttggggtcgtttaagagctaagctggaaacagcatagcaagtttaaataaggctagtccgttatcaacttgaaaaagtggcaccgagtcggtgctttttt

SEQ ID NO: 1645 - DNA, 112 bp, synthetic construct
  source 1..112: mol_type = other DNA
gcggcggggtggcctgggaggtttaagagctaagctggaaacagcatagcaagtttaaataaggctagtccgttatcaacttgaaaaagtggcaccgagtcggtgctttttt

SEQ ID NO: 1646 - DNA, 112 bp, synthetic construct
  source 1..112: mol_type = other DNA
agccccacggcgggccaccagtttaagagctaagctggaaacagcatagcaagtttaaataaggctagtccgttatcaacttgaaaaagtggcaccgagtcggtgctttttt

SEQ ID NO: 1647 - DNA, 112 bp, synthetic construct
  source 1..112: mol_type = other DNA
aagcgtcagagcgccgaggtgtttaagagctaagctggaaacagcatagcaagtttaaataaggctagtccgttatcaacttgaaaaagtggcaccgagtcggtgctttttt

SEQ ID NO: 1648 - DNA, 112 bp, synthetic construct
  source 1..112: mol_type = other DNA
cttctccaagttctccttgggtttaagagctaagctggaaacagcatagcaagtttaaataaggctagtccgttatcaacttgaaaaagtggcaccgagtcggtgctttttt

SEQ ID NO: 1649 - DNA, 112 bp, synthetic construct
  source 1..112: mol_type = other DNA
cggctctgcttcccttagacgtttaagagctaagctggaaacagcatagcaagtttaaataaggctagtccgttatcaacttgaaaaagtggcaccgagtcggtgctttttt

SEQ ID NO: 1650 - DNA, 112 bp, synthetic construct
  source 1..112: mol_type = other DNA
ggacaccgggcgctcattctgtttaagagctaagctggaaacagcatagcaagtttaaataaggctagtccgttatcaacttgaaaaagtggcaccgagtcggtgctttttt

SEQ ID NO: 1651 - DNA, 112 bp, synthetic construct
  source 1..112: mol_type = other DNA
gcgccccagcttgggacaccgtttaagagctaagctggaaacagcatagcaagtttaaataaggctagtccgttatcaacttgaaaaagtggcaccgagtcggtgctttttt

SEQ ID NO: 1652 - DNA, 112 bp, synthetic construct
  source 1..112: mol_type = other DNA
gaggaaggaccagagcgggagtttaagagctaagctggaaacagcatagcaagtttaaataaggctagtccgttatcaacttgaaaaagtggcaccgagtcggtgctttttt

SEQ ID NO: 1653 - DNA, 112 bp, synthetic construct
  source 1..112: mol_type = other DNA
gcagtgccaggttagagagagtttaagagctaagctggaaacagcatagcaagtttaaataaggctagtccgttatcaacttgaaaaagtggcaccgagtcggtgctttttt

SEQ ID NO: 1654 - DNA, 112 bp, synthetic construct
  source 1..112: mol_type = other DNA
tctccttggtggcccgccgtgtttaagagctaagctggaaacagcatagcaagtttaaataaggctagtccgttatcaacttgaaaaagtggcaccgagtcggtgctttttt

SEQ ID NO: 1655 - DNA, 112 bp, synthetic construct
  source 1..112: mol_type = other DNA
cgcgagcacagctaaggccagtttaagagctaagctggaaacagcatagcaagtttaaataaggctagtccgttatcaacttgaaaaagtggcaccgagtcggtgctttttt

SEQ ID NO: 1656 - DNA, 112 bp, synthetic construct; identical to SEQ ID NO: 1562
  source 1..112: mol_type = other DNA

SEQ ID NO: 1657 - DNA, 112 bp, synthetic construct
  source 1..112: mol_type = other DNA
ctcattctaggacttcaggcgtttaagagctaagctggaaacagcatagcaagtttaaataaggctagtccgttatcaacttgaaaaagtggcaccgagtcggtgctttttt

SEQ ID NO: 1658 - DNA, 112 bp, synthetic construct
  source 1..112: mol_type = other DNA
cgcagtgccaggttagagaggtttaagagctaagctggaaacagcatagcaagtttaaataaggctagtccgttatcaacttgaaaaagtggcaccgagtcggtgctttttt

SEQ ID NO: 1659 - DNA, 112 bp, synthetic construct
  source 1..112: mol_type = other DNA
tataagtggaggcgtcgcgcgtttaagagctaagctggaaacagcatagcaagtttaaataaggctagtccgttatcaacttgaaaaagtggcaccgagtcggtgctttttt

SEQ ID NO: 1660 - DNA, 112 bp, synthetic construct; identical to SEQ ID NO: 1562
  source 1..112: mol_type = other DNA

SEQ ID NO: 1661 - DNA, 112 bp, synthetic construct; identical to SEQ ID NO: 1571
  source 1..112: mol_type = other DNA

SEQ ID NO: 1662 - DNA, 112 bp, synthetic construct
  source 1..112: mol_type = other DNA
tcctgaagctgacagcattcgtttaagagctaagctggaaacagcatagcaagtttaaataaggctagtccgttatcaacttgaaaaagtggcaccgagtcggtgctttttt

SEQ ID NO: 1663 - DNA, 112 bp, synthetic construct
  source 1..112: mol_type = other DNA
cagagggtgcagagcgggaggtttaagagctaagctggaaacagcatagcaagtttaaataaggctagtccgttatcaacttgaaaaagtggcaccgagtcggtgctttttt

SEQ ID NO: 1664 - DNA, 112 bp, synthetic construct
  source 1..112: mol_type = other DNA
gaaagtccctctctctaaccgtttaagagctaagctggaaacagcatagcaagtttaaataaggctagtccgttatcaacttgaaaaagtggcaccgagtcggtgctttttt

SEQ ID NO: 1665 - DNA, 112 bp, synthetic construct
  source 1..112: mol_type = other DNA
gggccagtctgcaaagcgaggtttaagagctaagctggaaacagcatagcaagtttaaataaggctagtccgttatcaacttgaaaaagtggcaccgagtcggtgctttttt

SEQ ID NO: 1666 - DNA, 112 bp, synthetic construct
  source 1..112: mol_type = other DNA
aacttggagaagggaagtcagtttaagagctaagctggaaacagcatagcaagtttaaataaggctagtccgttatcaacttgaaaaagtggcaccgagtcggtgctttttt

SEQ ID NO: 1667 - DNA, 112 bp, synthetic construct
  source 1..112: mol_type = other DNA
actcacgctggatagcctccgtttaagagctaagctggaaacagcatagcaagtttaaataaggctagtccgttatcaacttgaaaaagtggcaccgagtcggtgctttttt

SEQ ID NO: 1668 - DNA, 112 bp, synthetic construct
  source 1..112: mol_type = other DNA
gagcacagcgagggccacaggtttaagagctaagctggaaacagcatagcaagtttaaataaggctagtccgttatcaacttgaaaaagtggcaccgagtcggtgctttttt

SEQ ID NO: 1669 - DNA, 112 bp, synthetic construct
  source 1..112: mol_type = other DNA
gggagaggaaggaccagagcgtttaagagctaagctggaaacagcatagcaagtttaaataaggctagtccgttatcaacttgaaaaagtggcaccgagtcggtgctttttt

SEQ ID NO: 1670 - DNA, 112 bp, synthetic construct
  source 1..112: mol_type = other DNA
agcacagcgagggccacagagtttaagagctaagctggaaacagcatagcaagtttaaataaggctagtccgttatcaacttgaaaaagtggcaccgagtcggtgctttttt

SEQ ID NO: 1671 - DNA, 112 bp, synthetic construct
  source 1..112: mol_type = other DNA
catcacgagactctaagaaagtttaagagctaagctggaaacagcatagcaagtttaaataaggctagtccgttatcaacttgaaaaagtggcaccgagtcggtgctttttt

SEQ ID NO: 1672 - DNA, 112 bp, synthetic construct
  source 1..112: mol_type = other DNA
ggagcgagagagcacagcgagtttaagagctaagctggaaacagcatagcaagtttaaataaggctagtccgttatcaacttgaaaaagtggcaccgagtcggtgctttttt

SEQ ID NO: 1673 - DNA, 112 bp, synthetic construct
  source 1..112: mol_type = other DNA
cgggagaggaaggaccagaggtttaagagctaagctggaaacagcatagcaagtttaaataaggctagtccgttatcaacttgaaaaagtggcaccgagtcggtgctttttt

SEQ ID NO: 1674 - DNA, 112 bp, synthetic construct
  source 1..112: mol_type = other DNA
gggcacgcgtttaatataaggtttaagagctaagctggaaacagcatagcaagtttaaataaggctagtccgttatcaacttgaaaaagtggcaccgagtcggtgctttttt

SEQ ID NO: 1675 - DNA, 112 bp, synthetic construct
  source 1..112: mol_type = other DNA
cgcgtgctgtttcctccccagtttaagagctaagctggaaacagcatagcaagtttaaataaggctagtccgttatcaacttgaaaaagtggcaccgagtcggtgctttttt

SEQ ID NO: 1676 - DNA, 112 bp, synthetic construct
  source 1..112: mol_type = other DNA
cgcagcagacaggcttacccgtttaagagctaagctggaaacagcatagcaagtttaaataaggctagtccgttatcaacttgaaaaagtggcaccgagtcggtgctttttt

SEQ ID NO: 1677 - DNA, 112 bp, synthetic construct
  source 1..112: mol_type = other DNA
gtccacagctctccagtctagtttaagagctaagctggaaacagcatagcaagtttaaataaggctagtccgttatcaacttgaaaaagtggcaccgagtcggtgctttttt

SEQ ID NO: 1678 - DNA, 112 bp, synthetic construct
  source 1..112: mol_type = other DNA
accaaggagaacttggagaagtttaagagctaagctggaaacagcatagcaagtttaaataaggctagtccgttatcaacttgaaaaagtggcaccgagtcggtgctttttt

SEQ ID NO: 1679 - DNA, 112 bp, synthetic construct
  source 1..112: mol_type = other DNA
ggggcaagtagcgcgcgtccgtttaagagctaagctggaaacagcatagcaagtttaaataaggctagtccgttatcaacttgaaaaagtggcaccgagtcggtgctttttt

SEQ ID NO: 1680 - DNA, 112 bp, synthetic construct
  source 1..112: mol_type = other DNA
tccacagctctccagtctaagtttaagagctaagctggaaacagcatagcaagtttaaataaggctagtccgttatcaacttgaaaaagtggcaccgagtcggtgctttttt

SEQ ID NO: 1681 - DNA, 112 bp, synthetic construct
  source 1..112: mol_type = other DNA
ggtggcctgggagtggggaagtttaagagctaagctggaaacagcatagcaagtttaaataaggctagtccgttatcaacttgaaaaagtggcaccgagtcggtgctttttt

SEQ ID NO: 1682 - DNA, 112 bp, synthetic construct
  source 1..112: mol_type = other DNA
gtggccccacatagacccaggtttaagagctaagctggaaacagcatagcaagtttaaataaggctagtccgttatcaacttgaaaaagtggcaccgagtcggtgctttttt

SEQ ID NO: 1683 - DNA, 112 bp, synthetic construct
  source 1..112: mol_type = other DNA
gctgtttcctccccacggtggtttaagagctaagctggaaacagcatagcaagtttaaataaggctagtccgttatcaacttgaaaaagtggcaccgagtcggtgctttttt

SEQ ID NO: 1684 - DNA, 112 bp, synthetic construct
  source 1..112: mol_type = other DNA
tgcttggctgtgatacaaaggtttaagagctaagctggaaacagcatagcaagtttaaataaggctagtccgttatcaacttgaaaaagtggcaccgagtcggtgctttttt

SEQ ID NO: 1685 - DNA, 112 bp, synthetic construct
  source 1..112: mol_type = other DNA
agcacctctgggtctatgtggtttaagagctaagctggaaacagcatagcaagtttaaataaggctagtccgttatcaacttgaaaaagtggcaccgagtcggtgctttttt

SEQ ID NO: 1686 - DNA, 112 bp, synthetic construct
  source 1..112: mol_type = other DNA
tcccttctccaagttctcctgtttaagagctaagctggaaacagcatagcaagtttaaataaggctagtccgttatcaacttgaaaaagtggcaccgagtcggtgctttttt

SEQ ID NO: 1687 - DNA, 112 bp, synthetic construct
  source 1..112: mol_type = other DNA
tcccttagactggagagctggtttaagagctaagctggaaacagcatagcaagtttaaataaggctagtccgttatcaacttgaaaaagtggcaccgagtcggtgctttttt

SEQ ID NO: 1688 - DNA, 112 bp, synthetic construct
  source 1..112: mol_type = other DNA
gagggtcgggacaaagtttagtttaagagctaagctggaaacagcatagcaagtttaaataaggctagtccgttatcaacttgaaaaagtggcaccgagtcggtgctttttt

SEQ ID NO: 1689 - DNA, 112 bp, synthetic construct
  source 1..112: mol_type = other DNA
gcccgaatgctgtcagcttcgtttaagagctaagctggaaacagcatagcaagtttaaataaggctagtccgttatcaacttgaaaaagtggcaccgagtcggtgctttttt

SEQ ID NO: 1690 - DNA, 112 bp, synthetic construct
  source 1..112: mol_type = other DNA
gacctttggcctacggcgacgtttaagagctaagctggaaacagcatagcaagtttaaataaggctagtccgttatcaacttgaaaaagtggcaccgagtcggtgctttttt

SEQ ID NO: 1691 - DNA, 112 bp, synthetic construct
  source 1..112: mol_type = other DNA
cggagcgagagagcacagcggtttaagagctaagctggaaacagcatagcaagtttaaataaggctagtccgttatcaacttgaaaaagtggcaccgagtcggtgctttttt

SEQ ID NO: 1692 - DNA, 112 bp, synthetic construct
  source 1..112: mol_type = other DNA
ctaggacatgcgaacttagcgtttaagagctaagctggaaacagcatagcaagtttaaataaggctagtccgttatcaacttgaaaaagtggcaccgagtcggtgctttttt

SEQ ID NO: 1693 - DNA, 112 bp, synthetic construct
  source 1..112: mol_type = other DNA
agggtaggagagactcacgcgtttaagagctaagctggaaacagcatagcaagtttaaataaggctagtccgttatcaacttgaaaaagtggcaccgagtcggtgctttttt

SEQ ID NO: 1694 - DNA, 112 bp, synthetic construct
  source 1..112: mol_type = other DNA
gtaggctcgtcccaaaggcggtttaagagctaagctggaaacagcatagcaagtttaaataaggctagtccgttatcaacttgaaaaagtggcaccgagtcggtgctttttt

SEQ ID NO: 1695 - DNA, 112 bp, synthetic construct
  source 1..112: mol_type = other DNA
gcgggccaccaaggagaactgtttaagagctaagctggaaacagcatagcaagtttaaataaggctagtccgttatcaacttgaaaaagtggcaccgagtcggtgctttttt

SEQ ID NO: 1696 - DNA, 112 bp, synthetic construct
  source 1..112: mol_type = other DNA
gtctatgtggggccacaccggtttaagagctaagctggaaacagcatagcaagtttaaataaggctagtccgttatcaacttgaaaaagtggcaccgagtcggtgctttttt

SEQ ID NO: 1697 - DNA, 112 bp, synthetic construct
  source 1..112: mol_type = other DNA
tggatctcggggaagcggcggtttaagagctaagctggaaacagcatagcaagtttaaataaggctagtccgttatcaacttgaaaaagtggcaccgagtcggtgctttttt

SEQ ID NO: 1698 - DNA, 112 bp, synthetic construct
  source 1..112: mol_type = other DNA
aagtggaggcgtcgcgctgggtttaagagctaagctggaaacagcatagcaagtttaaataaggctagtccgttatcaacttgaaaaagtggcaccgagtcggtgctttttt

SEQ ID NO: 1699 - DNA, 112 bp, synthetic construct
  source 1..112: mol_type = other DNA
gagagctgtggacttcgtctgtttaagagctaagctggaaacagcatagcaagtttaaataaggctagtccgttatcaacttgaaaaagtggcaccgagtcggtgctttttt

SEQ ID NO: 1700 - DNA, 112 bp, synthetic construct
  source 1..112: mol_type = other DNA
ggcgctcattctaggacttcgtttaagagctaagctggaaacagcatagcaagtttaaataaggctagtccgttatcaacttgaaaaagtggcaccgagtcggtgctttttt

SEQ ID NO: 1701 - DNA, 112 bp, synthetic construct
  source 1..112: mol_type = other DNA
gtctgggggaggcgtcgcccgtttaagagctaagctggaaacagcatagcaagtttaaataaggctagtccgttatcaacttgaaaaagtggcaccgagtcggtgctttttt

SEQ ID NO: 1702 - DNA, 112 bp, synthetic construct
  source 1..112: mol_type = other DNA
agctggagtgggggacgggtgtttaagagctaagctggaaacagcatagcaagtttaaataaggctagtccgttatcaacttgaaaaagtggcaccgagtcggtgctttttt

SEQ ID NO: 1703 - DNA, 112 bp, synthetic construct
  source 1..112: mol_type = other DNA
ccgggtaagcctgtctgctggtttaagagctaagctggaaacagcatagcaagtttaaataaggctagtccgttatcaacttgaaaaagtggcaccgagtcggtgctttttt

SEQ ID NO: 1704 - DNA, 112 bp, synthetic construct
  source 1..112: mol_type = other DNA
cctacggcgacgggagggtcgtttaagagctaagctggaaacagcatagcaagtttaaataaggctagtccgttatcaacttgaaaaagtggcaccgagtcggtgctttttt

SEQ ID NO: 1705 - DNA, 112 bp, synthetic construct
  source 1..112: mol_type = other DNA
gctaggacatgcgaacttaggtttaagagctaagctggaaacagcatagcaagtttaaataaggctagtccgttatcaacttgaaaaagtggcaccgagtcggtgctttttt

SEQ ID NO: 1706 - DNA, 112 bp, synthetic construct
  source 1..112: mol_type = other DNA
tttggcctacggcgacgggagtttaagagctaagctggaaacagcatagcaagtttaaataaggctagtccgttatcaacttgaaaaagtggcaccgagtcggtgctttttt

SEQ ID NO: 1707 - DNA, 112 bp, synthetic construct
  source 1..112: mol_type = other DNA
tcccccagcgcagctggagtgtttaagagctaagctggaaacagcatagcaagtttaaataaggctagtccgttatcaacttgaaaaagtggcaccgagtcggtgctttttt

SEQ ID NO: 1708 - DNA, 112 bp, synthetic construct
  source 1..112: mol_type = other DNA
cgcgcgctacttgcccctttgtttaagagctaagctggaaacagcatagcaagtttaaataaggctagtccgttatcaacttgaaaaagtggcaccgagtcggtgctttttt

SEQ ID NO: 1709 - DNA, 112 bp, synthetic construct
  source 1..112: mol_type = other DNA
ggggaagggggtgcgcacccgtttaagagctaagctggaaacagcatagcaagtttaaataaggctagtccgttatcaacttgaaaaagtggcaccgagtcggtgctttttt

SEQ ID NO: 1710 - DNA, 112 bp, synthetic construct
  source 1..112: mol_type = other DNA
aagaaaaggaaactgaaaacgtttaagagctaagctggaaacagcatagcaagtttaaataaggctagtccgttatcaacttgaaaaagtggcaccgagtcggtgctttttt

SEQ ID NO: 1711 - DNA, 112 bp, synthetic construct
  source 1..112: mol_type = other DNA
gaggtttgtgaacgcgtggagtttaagagctaagctggaaacagcatagcaagtttaaataaggctagtccgttatcaacttgaaaaagtggcaccgagtcggtgctttttt

SEQ ID NO: 1712 - DNA, 112 bp, synthetic construct
  source 1..112: mol_type = other DNA
tcgcatgtcctagcacctctgtttaagagctaagctggaaacagcatagcaagtttaaataaggctagtccgttatcaacttgaaaaagtggcaccgagtcggtgctttttt

SEQ ID NO: 1713 - DNA, 112 bp, synthetic construct
  source 1..112: mol_type = other DNA
ctcccgctctgcaccctctggtttaagagctaagctggaaacagcatagcaagtttaaataaggctagtccgttatcaacttgaaaaagtggcaccgagtcggtgctttttt

SEQ ID NO: 1714 - DNA, 112 bp, synthetic construct
  source 1..112: mol_type = other DNA
ccgtggggctagtccagggcgtttaagagctaagctggaaacagcatagcaagtttaaataaggctagtccgttatcaacttgaaaaagtggcaccgagtcggtgctttttt

SEQ ID NO: 1715 - DNA, 112 bp, synthetic construct
  source 1..112: mol_type = other DNA
tctctcctaccctcccgctcgtttaagagctaagctggaaacagcatagcaagtttaaataaggctagtccgttatcaacttgaaaaagtggcaccgagtcggtgctttttt

SEQ ID NO: 1716 - DNA, 112 bp, synthetic construct
  source 1..112: mol_type = other DNA
gaagcagagccgcagcagacgtttaagagctaagctggaaacagcatagcaagtttaaataaggctagtccgttatcaacttgaaaaagtggcaccgagtcggtgctttttt

SEQ ID NO: 1717 - DNA, 112 bp, synthetic construct
  source 1..112: mol_type = other DNA
ctccttggtggcccgccgtggtttaagagctaagctggaaacagcatagcaagtttaaataaggctagtccgttatcaacttgaaaaagtggcaccgagtcggtgctttttt

SEQ ID NO: 1718 - DNA, 112 bp, synthetic construct
  source 1..112: mol_type = other DNA
ggagggtcgggacaaagtttgtttaagagctaagctggaaacagcatagcaagtttaaataaggctagtccgttatcaacttgaaaaagtggcaccgagtcggtgctttttt

SEQ ID NO: 1719 - DNA, 112 bp, synthetic construct
  source 1..112: mol_type = other DNA
gagaaaccctcccccaacctgtttaagagctaagctggaaacagcatagcaagtttaaataaggctagtccgttatcaacttgaaaaagtggcaccgagtcggtgctttttt

SEQ ID NO: 1720 - DNA, 112 bp, synthetic construct
  source 1..112: mol_type = other DNA
cccccagcgcagctggagtggtttaagagctaagctggaaacagcatagcaagtttaaataaggctagtccgttatcaacttgaaaaagtggcaccgagtcggtgctttttt

SEQ ID NO: 1721 - DNA, 112 bp, synthetic construct
  source 1..112: mol_type = other DNA
ctggatctcggggaagcggcgtttaagagctaagctggaaacagcatagcaagtttaaataaggctagtccgttatcaacttgaaaaagtggcaccgagtcggtgctttttt

SEQ ID NO: 1722 - DNA, 112 bp, synthetic construct
  source 1..112: mol_type = other DNA
aggtttgtgaacgcgtggaggtttaagagctaagctggaaacagcatagcaagtttaaataaggctagtccgttatcaacttgaaaaagtggcaccgagtcggtgctttttt

SEQ ID NO: 1723 - DNA, 112 bp, synthetic construct
  source 1..112: mol_type = other DNA
ctatgtggggccacaccgtggtttaagagctaagctggaaacagcatagcaagtttaaataaggctagtccgttatcaacttgaaaaagtggcaccgagtcggtgctttttt

SEQ ID NO: 1724 - DNA, 112 bp, synthetic construct
  source 1..112: mol_type = other DNA
gctagtccagggctggatctgtttaagagctaagctggaaacagcatagcaagtttaaataaggctagtccgttatcaacttgaaaaagtggcaccgagtcggtgctttttt

SEQ ID NO: 1725 - DNA, 112 bp, synthetic construct
  source 1..112: mol_type = other DNA
tctatgtggggccacaccgtgtttaagagctaagctggaaacagcatagcaagtttaaataaggctagtccgttatcaacttgaaaaagtggcaccgagtcggtgctttttt

SEQ ID NO: 1726 - DNA, 112 bp, synthetic construct
  source 1..112: mol_type = other DNA
gtggcctgggagtggggaaggtttaagagctaagctggaaacagcatagcaagtttaaataaggctagtccgttatcaacttgaaaaagtggcaccgagtcggtgctttttt

SEQ ID NO: 1727 - DNA, 112 bp, synthetic construct
  source 1..112: mol_type = other DNA
gcacccccttccccactcccgtttaagagctaagctggaaacagcatagcaagtttaaataaggctagtccgttatcaacttgaaaaagtggcaccgagtcggtgctttttt

SEQ ID NO: 1728 - DNA, 112 bp, synthetic construct
  source 1..112: mol_type = other DNA
ggccgagatgtctcgctccggtttaagagctaagctggaaacagcatagcaagtttaaataaggctagtccgttatcaacttgaaaaagtggcaccgagtcggtgctttttt

SEQ ID NO: 1729 - DNA, 112 bp, synthetic construct
  source 1..112: mol_type = other DNA
gacgggtaggctcgtcccaagtttaagagctaagctggaaacagcatagcaagtttaaataaggctagtccgttatcaacttgaaaaagtggcaccgagtcggtgctttttt

SEQ ID NO: 1730 - DNA, 112 bp, synthetic construct
  source 1..112: mol_type = other DNA
ttctccttggtggcccgccggtttaagagctaagctggaaacagcatagcaagtttaaataaggctagtccgttatcaacttgaaaaagtggcaccgagtcggtgctttttt

SEQ ID NO: 1731 - DNA, 112 bp, synthetic construct
  source 1..112: mol_type = other DNA
gctggatctcggggaagcgggtttaagagctaagctggaaacagcatagcaagtttaaataaggctagtccgttatcaacttgaaaaagtggcaccgagtcggtgctttttt

SEQ ID NO: 1732 - DNA, 112 bp, synthetic construct
  source 1..112: mol_type = other DNA
gggcaagtagcgcgcgtcccgtttaagagctaagctggaaacagcatagcaagtttaaataaggctagtccgttatcaacttgaaaaagtggcaccgagtcggtgctttttt

SEQ ID NO: 1733 - DNA, 112 bp, synthetic construct
  source 1..112: mol_type = other DNA
actctctctttctggcctgggtttaagagctaagctggaaacagcatagcaagtttaaataaggctagtccgttatcaacttgaaaaagtggcaccgagtcggtgctttttt

SEQ ID NO: 1734 - DNA, 112 bp, synthetic construct
  source 1..112: mol_type = other DNA
gaggggcgcttggggtctgggtttaagagctaagctggaaacagcatagcaagtttaaataaggctagtccgttatcaacttgaaaaagtggcaccgagtcggtgctttttt

SEQ ID NO: 1735 - RNA, 20 nt, synthetic construct
  source 1..20: mol_type = other RNA
agtaaaagcagtaactgcta

SEQ ID NO: 1736 - RNA, 20 nt, synthetic construct
  source 1..20: mol_type = other RNA
ggccacggagcgagacatct

SEQ ID NO: 1737 - RNA, 20 nt, synthetic construct
  source 1..20: mol_type = other RNA
tttgttctgttgatttgtcg

SEQ ID NO: 1738 - protein, 2098 aa, synthetic construct
MPKKKRKVPKKKRKVNHDQEFDPPKVYPPVPAEKRKPIRVLSLFDGIATGLLVLKDLGIQVDRYIASEVCEDSITVGMVRHQGKIMYVGDVRSVTQKHIQEWGPFDLVIGGSPCNDLSIVNPARKGLYEGTGRLFFEFYRLLHDARPKEGDDRPFFWLFENVVAMGVSDKRDISRFLESNPVMIDAKEVSAAHRARYFWGNLPGMNRPLASTVNDKLELQECLEHGRIAKFSKVRTITTRSNSIKQGKDQHFPVFMNEKEDILWCTEMERVFGFPVHYTDVSNMSRLARQRLLGRSWSVPVIRHLFAPLKEYFACVSSGNSNANSRGPSFSSGLVPLSLRGSHNPLEMFETVPVWRRQPVRVLSLFEDIKKELTSLGFLESGSDPGQLKHVVDVTDTVRKDVEEWGPFDLVYGATPPLGHTCDRPPSWYLFQFHRLLQYARPKPGSPRPFFWMFVDNLVLNKEDLDVASRFLEMEPVTIPDVHGGSLQNAVRVWSNIPAIRSRHWALVSEEELSLLAQNKQSSKLAAKWPTKLVKNCFLPLREYFKYFSTELTSSLGGPSSGAPPPSGGSPAGSPTSTEEGTSESATPESGPGTSTEPSEGSAPGSPAGSPTSTEEGTSTEPSEGSAPGTSTEPSEMDKKYSIGLAIGTNSVGWAVITDEYKVPSKKFKVLGNTDRHSIKKNLIGALLFDSGETAEATRLKRTARRRYTRRKNRICYLQEIFSNEMAKVDDSFFHRLEESFLVEEDKKHERHPIFGNIVDEVAYHEKYPTIYHLRKKLVDSTDKADLRLIYLALAHMIKFRGHFLIEGDLNPDNSDVDKLFIQLVQTYNQLFEENPINASGVDAKAILSARLSKSRRLENLIAQLPGEKKNGLFGNLIALSLGLTPNFKSNFDLAEDAKLQLSKDTYDDDLDNLLAQIGDQYADLFLAAKNLSDAILLSDILRVNTEITKAPLSASMIKRYDEHHQDLTLLKALVRQQLPEKYKEIFFDQSKNGYAGYIDGGASQEEFYKFIKPILEKMDGTEELLVKLNREDLLRKQRTFDNGSIPHQIHLGELHAILRRQEDFYPFLKDNREKIEKILTFRIPYYVGPLARGNSRFAWMTRKSEETITPWNFEEVVDKGASAQSFIERMTNFDKNLPNEKVLPKHSLLYEYFTVYNELTKVKYVTEGMRKPAFLSGEQKKAIVDLLFKTNRKVTVKQLKEDYFKKIECFDSVEISGVEDRFNASLGTYHDLLKIIKDKDFLDNEENEDILEDIVLTLTLFEDREMIEERLKTYAHLFDDKVMKQLKRRRYTGWGRLSRKLINGIRDKQSGKTILDFLKSDGFANRNFMQLIHDDSLTFKEDIQKAQVSGQGDSLHEHIANLAGSPAIKKGILQTVKVVDELVKVMGRHKPENIVIEMARENQTTQKGQKNSRERMKRIEEGIKELGSQILKEHPVENTQLQNEKLYLYYLQNGRDMYVDQELDINRLSDYDVDAIVPQSFLKDDSIDNKVLTRSDKNRGKSDNVPSEEVVKKMKNYWRQLLNAKLITQRKFDNLTKAERGGLSELDKAGFIKRQLVETRQITKHVAQILDSRMNTKYDENDKLIREVKVITLKSKLVSDFRKDFQFYKVREINNYHHAHDAYLNAVVGTALIKKYPKLESEFVYGDYKVYDVRKMIAKSEQEIGKATAKYFFYSNIMNFFKTEITLANGEIRKRPLIETNGETGEIVWDKGRDFATVRKVLSMPQVNIVKKTEVQTGGFSKESILPKRNSDKLIARKKDWDPKKYGGFDSPTVAYSVLVVAKVEKGKSKKLKSVKELLGITIMERSSFEKNPIDFLEAKGYKEVKKDLIIKLPKYSLFELENGRKRMLASAGELQKGNELALPSKYVNFLYLASHYEKLKGSPEDNEQKQLFVEQHKHYLDEIIEQISEFSKRVILADANLDKVLSAYNKHRDKPIREQAENIIHLFTLTNLGAPAAFKYFDTTIDRKRYTSTKEVLDATLIHQSITGLYETRIDLSQLGGDSGSETPGTSESATPESTGRTLVTFKDVFVDFTREEWKLLDTAQQIVYRNVMLENYKNLVSLGYQLTKPDVILRLEKGEEPPKKKRKVPKKKRKV

SEQ ID NO: 1739 - DNA, 6294 bp, synthetic construct
  source 1..6294: mol_type = other DNA
atgccaaaaaagaagagaaaggtaccgaagaaaaaaagaaaggtcaaccatgatcaagaattcgacccacctaaagtctacccacctgtgcccgccgaaaaaaggaaacccataagggtgctgtcactctttgatggcatcgccactggtctcctggttcttaaggatctgggaattcaggtcgatcggtacattgctagcgaggtttgtgaggatagtattacagtgggtatggtgcgccaccagggaaagatcatgtatgttggtgacgttaggagcgtcacccagaaacatatccaggagtggggaccctttgatttggtgatcggaggtagtccctgcaatgacctttccatcgtgaatccagccaggaaagggctgtatgaagggactggtaggctctttttcgagttttatcgcctgcttcacgacgctagacctaaggaaggtgacgataggcctttcttttggctttttgagaacgtcgtggcaatgggagtctccgacaaaagggacatttctcgctttctggaatctaaccccgttatgatcgatgccaaggaagtttctgccgctcacagggcaaggtacttctggggcaatctgcccggaatgaatcgcccactggccagtaccgtgaatgacaaactggagctgcaggagtgcctggagcacggaagaatcgcaaagttttctaaagtcaggaccattaccactcgcagtaactccataaaacagggtaaggaccagcattttcccgtcttcatgaatgaaaaggaagatattctgtggtgcactgaaatggagagagttttcgggtttcccgtgcactataccgatgtttccaacatgtcccgccttgcaagacaaaggcttttgggccgctcttggtctgtgccagtgatccggcacttgtttgctcccctcaaagagtacttcgcttgcgtcagttccggaaattcaaacgctaactctcggggtccatctttctccagtggtctcgtgccactgtctctccggggctctcacaatcccctggagatgtttgagacagtgccagtctggcggaggcagcccgttcgcgttctctctctgttcgaagatattaaaaaggaactcacctcccttgggttcctggagagcgggagcgaccccggacagcttaagcacgtggtcgacgtgactgacaccgtccgcaaagacgtggaggaatggggccccttcgatctggtctatggggcaacccctccccttgggcatacatgtgatcggcctccatcctggtacctgttccagtttcacagactcctgcagtatgccaggccaaagccagggagcccaaggccctttttctggatgttcgtcgacaacctggtcctgaacaaagaagatctcgacgttgctagtcgctttctcgaaatggagcccgtgaccattcccgacgtgcatggcggttccctccagaatgcagtcagggtttggagcaatatccctgccatcaggtcaaggcactgggcactggtttcagaggaagagctgtccctccttgcccagaacaagcagtcatccaaactggcagccaagtggccaactaagctggtcaagaactgctttcttcccctcagagaatattttaagtatttcagtactgaactgactagcagtctgggagggccgagctctggcgcacccccaccaagtggagggtctcctgccgggtccccaacatctactgaagaaggcaccagcgaatccgcaacgcccgagtcaggccctggtacctccacagaaccatctgaaggtagtgcgcctggttccccagctggaagccctacttccaccgaagaaggcacgtcaaccgaaccaagtgaaggatctgcccctgggaccagcactgaaccatctgagatggacaagaagtacagcatcggcctggccatcggcaccaactctgtgggctgggccgtgatcaccgacgagtacaaggtgcccagcaagaaattcaaggtgctgggcaacaccgaccggcacagcatcaagaagaacctgatcggcgccctgctgttcgacagcggagaaacagccgaggccacccggctgaagagaaccgccagaagaagatacaccagacggaagaaccggatctgctatctgcaagagatcttcagcaacgagatggccaaggtggacgacagcttcttccacagactggaagagtccttcctggtggaagaggataagaagcacgagcggcaccccatcttcggcaacatcgtggacgaggtggcctaccacgagaagtaccccaccatctaccacctgagaaagaaactggtggacagcaccgacaaggccgacctgcggctgatctatctggccctggcccacatgatcaagttccggggccacttcctgatcgagggcgacctgaaccccgacaacagcgacgtggacaagctgttcatccagctggtgcagacctacaaccagctgttcgaggaaaaccccatcaacgccagcggcgtggacgccaaggccatcctgtctgccagactgagcaagagcagacggctggaaaatctgatcgcccagctgcccggcgagaagaagaatggcctgttcggcaacctgattgccctgagcctgggcctgacccccaacttcaagagcaacttcgacctggccgaggatgccaaactgcagctgagcaaggacacctacgacgacgacctggacaacctgctggcccagatcggcgaccagtacgccgacctgtttctggccgccaagaacctgtccgacgccatcctgctgagcgacatcctgagagtgaacaccgagatcaccaaggcccccctgagcgcctctatgatcaagagatacgacgagcaccaccaggacctgaccctgctgaaagctctcgtgcggcagcagctgcctgagaagtacaaagagattttcttcgaccagagcaagaacggctacgccggctacatcgatggcggagccagccaggaagagttctacaagttcatcaagcccatcctggaaaagatggacggcaccgaggaactgctcgtgaagctgaacagagaggacctgctgcggaagcagcggaccttcgacaacggcagcatcccccaccagatccacctgggagagctgcacgccattctgcggcggcaggaagatttttacccattcctgaaggacaaccgggaaaagatcgagaagatcctgaccttccgcatcccctactacgtgggccctctggccaggggaaacagcagattcgcctggatgaccagaaagagcgaggaaaccatcaccccctggaacttcgaggaagtggtggacaagggcgccagcgcccagagcttcatcgagcggatgaccaacttcgataagaacctgcccaacgagaaggtgctgcccaagcacagcctgctgtacgagtacttcaccgtgtacaacgagctgaccaaagtgaaatacgtgaccgagggaatgagaaagcccgccttcctgagcggcgagcagaaaaaagccatcgtggacctgctgttcaagaccaaccggaaagtgaccgtgaagcagctgaaagaggactacttcaagaaaatcgagtgcttcgactccgtggaaatctccggcgtggaagatcggttcaacgcctccctgggcacataccacgatctgctgaaaattatcaaggacaaggacttcctggacaatgaggaaaacgaggacattctggaagatatcgtgctgaccctgacactgtttgaggacagagagatgatcgaggaacggctgaaaacctatgcccacctgttcgacgacaaagtgatgaagcagctgaagcggcggagatacaccggctggggcaggctgagccggaagctgatcaacggcatccgggacaagcagtccggcaagacaatcctggatttcctgaagtccgacggcttcgccaacagaaacttcatgcagctgatccacgacgacagcctgacctttaaagaggacatccagaaagcccaggtgtccggccagggcgatagcctgcacgagcacattgccaatctggccggcagccccgccattaagaagggcatcctgcagacagtgaaggtggtggacgagctcgtgaaagtgatgggccggcacaagcccgagaacatcgtgatcgaaatggccagagagaaccagaccacccagaagggacagaagaacagccgcgagagaatgaagcggatcgaagagggcatcaaagagctgggcagccagatcctgaaagaacaccccgtggaaaacacccagctgcagaacgagaagctgtacctgtactacctgcagaatgggcgggatatgtacgtggaccaggaactggacatcaaccggctgtccgactacgatgtggacgctatcgtgcctcagagctttctgaaggacgactccatcgataacaaagtgctgactcggagcgacaagaaccggggcaagagcgacaacgtgccctccgaagaggtcgtgaagaagatgaagaactactggcgccagctgctgaatgccaagctgattacccagaggaagttcgacaatctgaccaaggccgagagaggcggcctgagcgaactggataaggccggcttcatcaagagacagctggtggaaacccggcagatcacaaagcacgtggcacagatcctggactcccggatgaacactaagtacgacgagaacgacaaactgatccgggaagtgaaagtgatcaccctgaagtccaagctggtgtccgatttccggaaggatttccagttttacaaagtgcgcgagatcaacaactaccaccacgcccacgacgcctacctgaacgccgtcgtgggaaccgccctgatcaaaaagtaccctaagctggaaagcgagttcgtgtacggcgactacaaggtgtacgacgtgcggaagatgatcgccaagagcgagcaggaaatcggcaaggctaccgccaagtacttcttctacagcaacatcatgaactttttcaagaccgagattaccctggccaacggcgagatccggaagcggcctctgatcgagacaaacggcgaaacaggcgagatcgtgtgggataagggccgggactttgccaccgtgcggaaagtgctgtctatgccccaagtgaatatcgtgaaaaagaccgaggtgcagacaggcggcttcagcaaagagtctatcctgcccaagaggaacagcgacaagctgatcgccagaaagaaggactgggaccctaagaagtacggcggcttcgacagccccaccgtggcctattctgtgctggtggtggccaaagtggaaaagggcaagtccaagaaactgaagagtgtgaaagagctgctggggatcaccatcatggaaagaagcagcttcgagaagaatcccatcgactttctggaagccaagggctacaaagaagtgaaaaaggacctgatcatcaagctgcctaagtactccctgttcgagctggaaaacggccggaagagaatgctggcctctgccggcgaactgcagaagggaaacgaactggccctgccctccaaatatgtgaacttcctgtacctggccagccactatgagaagctgaagggctcccccgaggataatgagcagaaacagctgtttgtggaacagcacaaacactacctggacgagatcatcgagcagatcagcgagttctccaagagagtgatcctggccgacgctaatctggacaaggtgctgagcgcctacaacaagcacagagacaagcctatcagagagcaggccgagaatatcatccacctgtttaccctgaccaatctgggagcccctgccgccttcaagtactttgacaccaccatcgaccggaagaggtacaccagcaccaaagaggtgctggacgccaccctgatccaccagagcatcaccggcctgtacgagacacggatcgacctgtctcagctgggaggcgacagcggaagtgagaccccaggtacatccgaatcagcaacgcctgaaagcaccggtcggacactggtgaccttcaaggatgtatttgtggacttcaccagggaggagtggaagctgctggacactgctcagcagatcgtgtacagaaatgtgatgctggagaactataagaacctggtttccttgggttatcagcttactaagccagatgtgatcctccggttggagaagggagaagagcccccaaaaaagaagagaaaggtaccgaagaaaaaaagaaaggtc

SEQ ID NO: 1740 - protein, 2084 aa, synthetic construct
MNHDQEFDPPKVYPPVPAEKRKPIRVLSLFDGIATGLLVLKDLGIQVDRYIASEVCEDSITVGMVRHQGKIMYVGDVRSVTQKHIQEWGPFDLVIGGSPCNDLSIVNPARKGLYEGTGRLFFEFYRLLHDARPKEGDDRPFFWLFENVVAMGVSDKRDISRFLESNPVMIDAKEVSAAHRARYFWGNLPGMNRPLASTVNDKLELQECLEHGRIAKFSKVRTITTRSNSIKQGKDQHFPVFMNEKEDILWCTEMERVFGFPVHYTDVSNMSRLARQRLLGRSWSVPVIRHLFAPLKEYFACVSSGNSNANSRGPSFSSGLVPLSLRGSHNPLEMFETVPVWRRQPVRVLSLFEDIKKELTSLGFLESGSDPGQLKHVVDVTDTVRKDVEEWGPFDLVYGATPPLGHTCDRPPSWYLFQFHRLLQYARPKPGSPRPFFWMFVDNLVLNKEDLDVASRFLEMEPVTIPDVHGGSLQNAVRVWSNIPAIRSRHWALVSEEELSLLAQNKQSSKLAAKWPTKLVKNCFLPLREYFKYFSTELTSSLGGPSSGAPPPSGGSPAGSPTSTEEGTSESATPESGPGTSTEPSEGSAPGSPAGSPTSTEEGTSTEPSEGSAPGTSTEPSEPKKKRKVMDKKYSIGLAIGTNSVGWAVITDEYKVPSKKFKVLGNTDRHSIKKNLIGALLFDSGETAEATRLKRTARRRYTRRKNRICYLQEIFSNEMAKVDDSFFHRLEESFLVEEDKKHERHPIFGNIVDEVAYHEKYPTIYHLRKKLVDSTDKADLRLIYLALAHMIKFRGHFLIEGDLNPDNSDVDKLFIQLVQTYNQLFEENPINASGVDAKAILSARLSKSRRLENLIAQLPGEKKNGLFGNLIALSLGLTPNFKSNFDLAEDAKLQLSKDTYDDDLDNLLAQIGDQYADLFLAAKNLSDAILLSDILRVNTEITKAPLSASMIKRYDEHHQDLTLLKALVRQQLPEKYKEIFFDQSKNGYAGYIDGGASQEEFYKFIKPILEKMDGTEELLVKLNREDLLRKQRTFDNGSIPHQIHLGELHAILRRQEDFYPFLKDNREKIEKILTFRIPYYVGPLARGNSRFAWMTRKSEETITPWNFEEVVDKGASAQSFIERMTNFDKNLPNEKVLPKHSLLYEYFTVYNELTKVKYVTEGMRKPAFLSGEQKKAIVDLLFKTNRKVTVKQLKEDYFKKIECFDSVEISGVEDRFNASLGTYHDLLKIIKDKDFLDNEENEDILEDIVLTLTLFEDREMIEERLKTYAHLFDDKVMKQLKRRRYTGWGRLSRKLINGIRDKQSGKTILDFLKSDGFANRNFMQLIHDDSLTFKEDIQKAQVSGQGDSLHEHIANLAGSPAIKKGILQTVKVVDELVKVMGRHKPENIVIEMARENQTTQKGQKNSRERMKRIEEGIKELGSQILKEHPVENTQLQNEKLYLYYLQNGRDMYVDQELDINRLSDYDVDAIVPQSFLKDDSIDNKVLTRSDKNRGKSDNVPSEEVVKKMKNYWRQLLNAKLITQRKFDNLTKAERGGLSELDKAGFIKRQLVETRQITKHVAQILDSRMNTKYDENDKLIREVKVITLKSKLVSDFRKDFQFYKVREINNYHHAHDAYLNAVVGTALIKKYPKLESEFVYGDYKVYDVRKMIAKSEQEIGKATAKYFFYSNIMNFFKTEITLANGEIRKRPLIETNGETGEIVWDKGRDFATVRKVLSMPQVNIVKKTEVQTGGFSKESILPKRNSDKLIARKKDWDPKKYGGFDSPTVAYSVLVVAKVEKGKSKKLKSVKELLGITIMERSSFEKNPIDFLEAKGYKEVKKDLIIKLPKYSLFELENGRKRMLASAGELQKGNELALPSKYVNFLYLASHYEKLKGSPEDNEQKQLFVEQHKHYLDEIIEQISEFSKRVILADANLDKVLSAYNKHRDKPIREQAENIIHLFTLTNLGAPAAFKYFDTTIDRKRYTSTKEVLDATLIHQSITGLYETRIDLSQLGGDPKKKRKVSGSETPGTSESATPESTGRTLVTFKDVFVDFTREEWKLLDTAQQIVYRNVMLENYKNLVSLGYQLTKPDVILRLEKGEEP

SEQ ID NO: 1741 - DNA, 6252 bp, synthetic construct
  source 1..6252: mol_type = other DNA
atgaaccacgaccaggaatttgaccctccaaaggtttacccacctgtcccagctgagaagaggaagcccatccgggtgctgtctctctttgatggaatcgctacagggctcctggtgctgaaggacttgggcattcaggtggaccgctacattgcctcggaggtgtgtgaggactccatcacggtgggcatggtgcggcaccaggggaagatcatgtacgtcggggacgtccgcagcgtcacacagaagcatatccaggagtggggcccattcgatctggtgattgggggcagtccctgcaatgacctctccatcgtcaaccctgctcgcaagggcctctacgagggcactggccggctcttctttgagttctaccgcctcctgcatgatgcgcggcccaaggagggagatgatcgccccttcttctggctctttgagaatgtggtggccatgggcgttagtgacaagagggacatctcgcgatttctcgagtccaaccctgtgatgattgatgccaaagaagtgtcagctgcacacagggcccgctacttctggggtaaccttcccggtatgaacaggccgttggcatccactgtgaatgataagctggagctgcaggagtgtctggagcatggcaggatagccaagttcagcaaagtgaggaccattactacgaggtcaaactccataaagcagggcaaagaccagcattttcctgtcttcatgaatgagaaagaggacatcttatggtgcactgaaatggaaagggtatttggtttcccagtccactatactgacgtctccaacatgagccgcttggcgaggcagagactgctgggccggtcatggagcgtgccagtcatccgccacctcttcgctccgctgaaggagtattttgcgtgtgtgtctagcggcaatagtaacgctaacagccgcgggccgagcttcagcagcggcctggtgccgttaagcttgcgcggcagccataatccccttgagatgttcgaaaccgtgcctgtgtggaggagacagccagtccgggtgctgtccctttttgaagacatcaagaaagagctgacgagtttgggctttttggaaagtggttctgacccgggacaactgaagcatgtggttgatgtcacagacacagtgaggaaggatgtggaggagtggggacccttcgatcttgtgtacggcgccacacctcccctgggccacacctgtgaccgtcctcccagctggtacctgttccagttccaccggctcctgcagtacgcacggcccaagccaggcagccccaggcccttcttctggatgttcgtggacaatctggtgctgaacaaggaagacctggacgtcgcatctcgcttcctggagatggagccagtcaccatcccagatgtccacggcggatccttgcagaatgctgtccgcgtgtggagcaacatcccagccataaggagcaggcactgggctctggtttcggaagaagaattgtccctgctggcccagaacaagcagagctcgaagctcgcggccaagtggcccaccaagctggtgaagaactgctttctccccctaagagaatatttcaagtatttttcaacagaactcacttcctctttaggagggccgagctctggcgcacccccaccaagtggagggtctcctgccgggtccccaacatctactgaagaaggcaccagcgaatccgcaacgcccgagtcaggccctggtacctccacagaaccatctgaaggtagtgcgcctggttccccagctggaagccctacttccaccgaagaaggcacgtcaaccgaaccaagtgaaggatctgcccctgggaccagcactgaaccatctgagccaaaaaagaagagaaaggtaatggacaagaagtacagcatcggcctggccatcggcaccaactctgtgggctgggccgtgatcaccgacgagtacaaggtgcccagcaagaaattcaaggtgctgggcaacaccgaccggcacagcatcaagaagaacctgatcggcgccctgctgttcgacagcggagaaacagccgaggccacccggctgaagagaaccgccagaagaagatacaccagacggaagaaccggatctgctatctgcaagagatcttcagcaacgagatggccaaggtggacgacagcttcttccacagactggaagagtccttcctggtggaagaggataagaagcacgagcggcaccccatcttcggcaacatcgtggacgaggtggcctaccacgagaagtaccccaccatctaccacctgagaaagaaactggtggacagcaccgacaaggccgacctgcggctgatctatctggccctggcccacatgatcaagttccggggccacttcctgatcgagggcgacctgaaccccgacaacagcgacgtggacaagctgttcatccagctggtgcagacctacaaccagctgttcgaggaaaaccccatcaacgccagcggcgtggacgccaaggccatcctgtctgccagactgagcaagagcagacggctggaaaatctgatcgcccagctgcccggcgagaagaagaatggcctgttcggcaacctgattgccctgagcctgggcctgacccccaacttcaagagcaacttcgacctggccgaggatgccaaactgcagctgagcaaggacacctacgacgacgacctggacaacctgctggcccagatcggcgaccagtacgccgacctgtttctggccgccaagaacctgtccgacgccatcctgctgagcgacatcctgagagtgaacaccgagatcaccaaggcccccctgagcgcctctatgatcaagagatacgacgagcaccaccaggacctgaccctgctgaaagctctcgtgcggcagcagctgcctgagaagtacaaagagattttcttcgaccagagcaagaacggctacgccggctacatcgatggcggagccagccaggaagagttctacaagttcatcaagcccatcctggaaaagatggacggcaccgaggaactgctcgtgaagctgaacagagaggacctgctgcggaagcagcggaccttcgacaacggcagcatcccccaccagatccacctgggagagctgcacgccattctgcggcggcaggaagatttttacccattcctgaaggacaaccgggaaaagatcgagaagatcctgaccttccgcatcccctactacgtgggccctctggccaggggaaacagcagattcgcctggatgaccagaaagagcgaggaaaccatcaccccctggaacttcgaggaagtggtggacaagggcgccagcgcccagagcttcatcgagcggatgaccaacttcgataagaacctgcccaacgagaaggtgctgcccaagcacagcctgctgtacgagtacttcaccgtgtacaacgagctgaccaaagtgaaatacgtgaccgagggaatgagaaagcccgccttcctgagcggcgagcagaaaaaagccatcgtggacctgctgttcaagaccaaccggaaagtgaccgtgaagcagctgaaagaggactacttcaagaaaatcgagtgcttcgactccgtggaaatctccggcgtggaagatcggttcaacgcctccctgggcacataccacgatctgctgaaaattatcaaggacaaggacttcctggacaatgaggaaaacgaggacattctggaagatatcgtgctgaccctgacactgtttgaggacagagagatgatcgaggaacggctgaaaacctatgcccacctgttcgacgacaaagtgatgaagcagctgaagcggcggagatacaccggctggggcaggctgagccggaagctgatcaacggcatccgggacaagcagtccggcaagacaatcctggatttcctgaagtccgacggcttcgccaacagaaacttcatgcagctgatccacgacgacagcctgacctttaaagaggacatccagaaagcccaggtgtccggccagggcgatagcctgcacgagcacattgccaatctggccggcagccccgccattaagaagggcatcctgcagacagtgaaggtggtggacgagctcgtgaaagtgatgggccggcacaagcccgagaacatcgtgatcgaaatggccagagagaaccagaccacccagaagggacagaagaacagccgcgagagaatgaagcggatcgaagagggcatcaaagagctgggcagccagatcctgaaagaacaccccgtggaaaacacccagctgcagaacgagaagctgtacctgtactacctgcagaatgggcgggatatgtacgtggaccaggaactggacatcaaccggctgtccgactacgatgtggacgctatcgtgcctcagagctttctgaaggacgactccatcgataacaaagtgctgactcggagcgacaagaaccggggcaagagcgacaacgtgccctccgaagaggtcgtgaagaagatgaagaactactggcgccagctgctgaatgccaagctgattacccagaggaagttcgacaatctgaccaaggccgagagaggcggcctgagcgaactggataaggccggcttcatcaagagacagctggtggaaacccggcagatcacaaagcacgtggcacagatcctggactcccggatgaacactaagtacgacgagaacgacaaactgatccgggaagtgaaagtgatcaccctgaagtccaagctggtgtccgatttccggaaggatttccagttttacaaagtgcgcgagatcaacaactaccaccacgcccacgacgcctacctgaacgccgtcgtgggaaccgccctgatcaaaaagtaccctaagctggaaagcgagttcgtgtacggcgactacaaggtgtacgacgtgcggaagatgatcgccaagagcgagcaggaaatcggcaaggctaccgccaagtacttcttctacagcaacatcatgaactttttcaagaccgagattaccctggccaacggcgagatccggaagcggcctctgatcgagacaaacggcgaaacaggcgagatcgtgtgggataagggccgggactttgccaccgtgcggaaagtgctgtctatgccccaagtgaatatcgtgaaaaagaccgaggtgcagacaggcggcttcagcaaagagtctatcctgcccaagaggaacagcgacaagctgatcgccagaaagaaggactgggaccctaagaagtacggcggcttcgacagccccaccgtggcctattctgtgctggtggtggccaaagtggaaaagggcaagtccaagaaactgaagagtgtgaaagagctgctggggatcaccatcatggaaagaagcagcttcgagaagaatcccatcgactttctggaagccaagggctacaaagaagtgaaaaaggacctgatcatcaagctgcctaagtactccctgttcgagctggaaaacggccggaagagaatgctggcctctgccggcgaactgcagaagggaaacgaactggccctgccctccaaatatgtgaacttcctgtacctggccagccactatgagaagctgaagggctcccccgaggataatgagcagaaacagctgtttgtggaacagcacaaacactacctggacgagatcatcgagcagatcagcgagttctccaagagagtgatcctggccgacgctaatctggacaaggtgctgagcgcctacaacaagcacagagacaagcctatcagagagcaggccgagaatatcatccacctgtttaccctgaccaatctgggagcccctgccgccttcaagtactttgacaccaccatcgaccggaagaggtacaccagcaccaaagaggtgctggacgccaccctgatccaccagagcatcaccggcctgtacgagacacggatcgacctgtctcagctgggaggcgacccaaaaaagaagagaaaggtaagcggaagtgagaccccaggtacatccgaatcagcaacgcctgaaagcaccggtcggacactggtgaccttcaaggatgtatttgtggacttcaccagggaggagtggaagctgctggacactgctcagcagatcgtgtacagaaatgtgatgctggagaactataagaacctggtttccttgggttatcagcttactaagccagatgtgatcctccggttggagaagggagaagagccc

SEQ ID NO: 1742 - protein, 2219 aa, synthetic construct
MNHDQEFDPPKVYPPVPAEKRKPIRVLSLFDGIATGLLVLKDLGIQVDRYIASEVCEDSITVGMVRHQGKIMYVGDVRSVTQKHIQEWGPFDLVIGGSPCNDLSIVNPARKGLYEGTGRLFFEFYRLLHDARPKEGDDRPFFWLFENVVAMGVSDKRDISRFLESNPVMIDAKEVSAAHRARYFWGNLPGMNRPLASTVNDKLELQECLEHGRIAKFSKVRTITTRSNSIKQGKDQHFPVFMNEKEDILWCTEMERVFGFPVHYTDVSNMSRLARQRLLGRSWSVPVIRHLFAPLKEYFACVSSGNSNANSRGPSFSSGLVPLSLRGSHMEVKVNRRSIEDICLCCGTLQVYTRHPLFEGGLCAPCKDKFLESLFLYDDDGHQSYCTICCSGGTLFICESPDCTRCYCFECVDILVGPGTSERINAMACWVCFLCLPFSRSGLLQRRKRWRHQLKAFHDQEGAGPMEIYKTVSAWKRQPVRVLSLFRNIDKVLKSLGFLESGSGSGGGTLKYVEDVTNVVRRDVEKWGPFDLVYGSTQPLGSSCDRCPGWYMFQFHRILQYALPRQESQRPFFWIFMDNLLLTEDDQETTTRFLQTEAVTLQDVRGRDYQNAMRVWSNIPGLKSKHAPLTPKEEEYLQAQVRSRSKLDAPKVDLLVKNCLLPLREYFKYFSQNSLPLGGPSSGAPPPSGGSPAGSPTSTEEGTSESATPESGPGTSTEPSEGSAPGSPAGSPTSTEEGTSTEPSEGSAPGTSTEPSEPKKKRKVMDKKYSIGLAIGTNSVGWAVITDEYKVPSKKFKVLGNTDRHSIKKNLIGALLFDSGETAEATRLKRTARRRYTRRKNRICYLQEIFSNEMAKVDDSFFHRLEESFLVEEDKKHERHPIFGNIVDEVAYHEKYPTIYHLRKKLVDSTDKADLRLIYLALAHMIKFRGHFLIEGDLNPDNSDVDKLFIQLVQTYNQLFEENPINASGVDAKAILSARLSKSRRLENLIAQLPGEKKNGLFGNLIALSLGLTPNFKSNFDLAEDAKLQLSKDTYDDDLDNLLAQIGDQYADLFLAAKNLSDAILLSDILRVNTEITKAPLSASMIKRYDEHHQDLTLLKALVRQQLPEKYKEIFFDQSKNGYAGYIDGGASQEEFYKFIKPILEKMDGTEELLVKLNREDLLRKQRTFDNGSIPHQIHLGELHAILRRQEDFYPFLKDNREKIEKILTFRIPYYVGPLARGNSRFAWMTRKSEETITPWNFEEVVDKGASAQSFIERMTNFDKNLPNEKVLPKHSLLYEYFTVYNELTKVKYVTEGMRKPAFLSGEQKKAIVDLLFKTNRKVTVKQLKEDYFKKIECFDSVEISGVEDRFNASLGTYHDLLKIIKDKDFLDNEENEDILEDIVLTLTLFEDREMIEERLKTYAHLFDDKVMKQLKRRRYTGWGRLSRKLINGIRDKQSGKTILDFLKSDGFANRNFMQLIHDDSLTFKEDIQKAQVSGQGDSLHEHIANLAGSPAIKKGILQTVKVVDELVKVMGRHKPENIVIEMARENQTTQKGQKNSRERMKRIEEGIKELGSQILKEHPVENTQLQNEKLYLYYLQNGRDMYVDQELDINRLSDYDVDAIVPQSFLKDDSIDNKVLTRSDKNRGKSDNVPSEEVVKKMKNYWRQLLNAKLITQRKFDNLTKAERGGLSELDKAGFIKRQLVETRQITKHVAQILDSRMNTKYDENDKLIREVKVITLKSKLVSDFRKDFQFYKVREINNYHHAHDAYLNAVVGTALIKKYPKLESEFVYGDYKVYDVRKMIAKSEQEIGKATAKYFFYSNIMNFFKTEITLANGEIRKRPLIETNGETGEIVWDKGRDFATVRKVLSMPQVNIVKKTEVQTGGFSKESILPKRNSDKLIARKKDWDPKKYGGFDSPTVAYSVLVVAKVEKGKSKKLKSVKELLGITIMERSSFEKNPIDFLEAKGYKEVKKDLIIKLPKYSLFELENGRKRMLASAGELQKGNELALPSKYVNFLYLASHYEKLKGSPEDNEQKQLFVEQHKHYLDEIIEQISEFSKRVILADANLDKVLSAYNKHRDKPIREQAENIIHLFTLTNLGAPAAFKYFDTTIDRKRYTSTKEVLDATLIHQSITGLYETRIDLSQLGGDPKKKRKVSGSETPGTSESATPESTGRTLVTFKDVFVDFTREEWKLLDTAQQIVYRNVMLENYKNLVSLGYQLTKPDVILRLEKGEEP

SEQ ID NO: 1743 - DNA, 6657 bp, synthetic construct
  source 1..6657: mol_type = other DNA
atgaaccatgaccaggaatttgaccccccaaaggtttacccacctgtgccagctgagaagaggaagcccatccgcgtgctgtctctctttgatgggattgctacagggctcctggtgctgaaggacctgggcatccaagtggaccgctacattgcctccgaggtgtgtgaggactccatcacggtgggcatggtgcggcaccagggaaagatcatgtacgtcggggacgtccgcagcgtcacacagaagcatatccaggagtggggcccattcgacctggtgattggaggcagtccctgcaatgacctctccattgtcaaccctgcccgcaagggactttatgagggtactggccgcctcttctttgagttctaccgcctcctgcatgatgcgcggcccaaggagggagatgatcgccccttcttctggctctttgagaatgtggtggccatgggcgttagtgacaagagggacatctcgcgatttcttgagtctaaccccgtgatgattgacgccaaagaagtgtctgctgcacacagggcccgttacttctggggtaaccttcctggcatgaacaggcctttggcatccactgtgaatgataagctggagctgcaagagtgtctggagcacggcagaatagccaagttcagcaaagtgaggaccattaccaccaggtcaaactctataaagcagggcaaagaccagcatttccccgtcttcatgaacgagaaggaggacatcctgtggtgcactgaaatggaaagggtgtttggcttccccgtccactacacagacgtctccaacatgagccgcttggcgaggcagagactgctgggccgatcgtggagcgtgccggtcatccgccacctcttcgctccgctgaaggaatattttgcttgtgtgtctagcggcaatagtaacgctaacagccgcgggccgagcttcagcagcggcctggtgccgttaagcttgcgcggcagccatatggaagtcaaagtgaaccgacggagcattgaagacatctgcctctgctgtggaactctccaggtgtacactcggcaccccttgtttgagggagggttatgtgccccatgtaaggataagttcctggagtccctcttcctgtatgatgatgatggacaccagagttactgcaccatctgctgttccgggggtaccctgttcatctgtgagagccccgactgtaccagatgctactgtttcgagtgtgtggacatcctggtgggccccgggacctcagagaggatcaatgccatggcctgctgggtttgcttcctgtgcctgcccttctcacggagtggactgctgcagaggcgcaagaggtggcggcaccagctgaaggccttccatgatcaagagggagcgggccctatggagatatacaagacagtgtctgcatggaagagacagccagtgcgggtactgagcctcttcagaaacatcgacaaggtactaaagagtttgggcttcttggaaagcggttctggttctgggggaggaacgctgaagtacgtggaagatgtcacaaatgtcgtgaggagagacgtggagaaatggggcccctttgacctggtgtacggctcgacgcagcccctaggcagctcttgtgatcgctgtcccggctggtacatgttccagttccaccggatcctgcagtatgcgctgcctcgccaggagagtcagcggcccttcttctggatattcatggacaatctgctgctgactgaggatgaccaagagacaactacccgcttccttcagacagaggctgtgaccctccaggatgtccgtggcagagactaccagaatgctatgcgggtgtggagcaacattccagggctgaagagcaagcatgcgcccctgaccccaaaggaagaagagtatctgcaagcccaagtcagaagcaggagcaagctggacgccccgaaagttgacctcctggtgaagaactgccttctcccgctgagagagtacttcaagtatttttctcaaaactcacttcctcttggagggccgagctctggcgcacccccaccaagtggagggtctcctgccgggtccccaacatctactgaagaaggcaccagcgaatccgcaacgcccgagtcaggccctggtacctccacagaaccatctgaaggtagtgcgcctggttccccagctggaagccctacttccaccgaagaaggcacgtcaaccgaaccaagtgaaggatctgcccctgggaccagcactgaaccatctgagccaaaaaagaagagaaaggtaatggacaagaagtacagcatcggcctggccatcggcaccaactctgtgggctgggccgtgatcaccgacgagtacaaggtgcccagcaagaaattcaaggtgctgggcaacaccgaccggcacagcatcaagaagaacctgatcggcgccctgctgttcgacagcggagaaacagccgaggccacccggctgaagagaaccgccagaagaagatacaccagacggaagaaccggatctgctatctgcaagagatcttcagcaacgagatggccaaggtggacgacagcttcttccacagactggaagagtccttcctggtggaagaggataagaagcacgagcggcaccccatcttcggcaacatcgtggacgaggtggcctaccacgagaagtaccccaccatctaccacctgagaaagaaactggtggacagcaccgacaaggccgacctgcggctgatctatctggccctggcccacatgatcaagttccggggccacttcctgatcgagggcgacctgaaccccgacaacagcgacgtggacaagctgttcatccagctggtgcagacctacaaccagctgttcgaggaaaaccccatcaacgccagcggcgtggacgccaaggccatcctgtctgccagactgagcaagagcagacggctggaaaatctgatcgcccagctgcccggcgagaagaagaatggcctgttcggcaacctgattgccctgagcctgggcctgacccccaacttcaagagcaacttcgacctggccgaggatgccaaactgcagctgagcaaggacacctacgacgacgacctggacaacctgctggcccagatcggcgaccagtacgccgacctgtttctggccgccaagaacctgtccgacgccatcctgctgagcgacatcctgagagtgaacaccgagatcaccaaggcccccctgagcgcctctatgatcaagagatacgacgagcaccaccaggacctgaccctgctgaaagctctcgtgcggcagcagctgcctgagaagtacaaagagattttcttcgaccagagcaagaacggctacgccggctacatcgatggcggagccagccaggaagagttctacaagttcatcaagcccatcctggaaaagatggacggcaccgaggaactgctcgtgaagctgaacagagaggacctgctgcggaagcagcggaccttcgacaacggcagcatcccccaccagatccacctgggagagctgcacgccattctgcggcggcaggaagatttttacccattcctgaaggacaaccgggaaaagatcgagaagatcctgaccttccgcatcccctactacgtgggccctctggccaggggaaacagcagattcgcctggatgaccagaaagagcgaggaaaccatcaccccctggaacttcgaggaagtggtggacaagggcgccagcgcccagagcttcatcgagcggatgaccaacttcgataagaacctgcccaacgagaaggtgctgcccaagcacagcctgctgtacgagtacttcaccgtgtacaacgagctgaccaaagtgaaatacgtgaccgagggaatgagaaagcccgccttcctgagcggcgagcagaaaaaagccatcgtggacctgctgttcaagaccaaccggaaagtgaccgtgaagcagctgaaagaggactacttcaagaaaatcgagtgcttcgactccgtggaaatctccggcgtggaagatcggttcaacgcctccctgggcacataccacgatctgctgaaaattatcaaggacaaggacttcctggacaatgaggaaaacgaggacattctggaagatatcgtgctgaccctgacactgtttgaggacagagagatgatcgaggaacggctgaaaacctatgcccacctgttcgacgacaaagtgatgaagcagctgaagcggcggagatacaccggctggggcaggctgagccggaagctgatcaacggcatccgggacaagcagtccggcaagacaatcctggatttcctgaagtccgacggcttcgccaacagaaacttcatgcagctgatccacgacgacagcctgacctttaaagaggacatccagaaagcccaggtgtccggccagggcgatagcctgcacgagcacattgccaatctggccggcagccccgccattaagaagggcatcctgcagacagtgaaggtggtggacgagctcgtgaaagtgatgggccggcacaagcccgagaacatcgtgatcgaaatggccagagagaaccagaccacccagaagggacagaagaacagccgcgagagaatgaagcggatcgaagagggcatcaaagagctgggcagccagatcctgaaagaacaccccgtggaaaacacccagctgcagaacgagaagctgtacctgtactacctgcagaatgggcgggatatgtacgtggaccaggaactggacatcaaccggctgtccgactacgatgtggacgctatcgtgcctcagagctttctgaaggacgactccatcgataacaaagtgctgactcggagcgacaagaaccggggcaagagcgacaacgtgccctccgaagaggtcgtgaagaagatgaagaactactggcgccagctgctgaatgccaagctgattacccagaggaagttcgacaatctgaccaaggccgagagaggcggcctgagcgaactggataaggccggcttcatcaagagacagctggtggaaacccggcagatcacaaagcacgtggcacagatcctggactcccggatgaacactaagtacgacgagaacgacaaactgatccgggaagtgaaagtgatcaccctgaagtccaagctggtgtccgatttccggaaggatttccagttttacaaagtgcgcgagatcaacaactaccaccacgcccacgacgcctacctgaacgccgtcgtgggaaccgccctgatcaaaaagtaccctaagctggaaagcgagttcgtgtacggcgactacaaggtgtacgacgtgcggaagatgatcgccaagagcgagcaggaaatcggcaaggctaccgccaagtacttcttctacagcaacatcatgaactttttcaagaccgagattaccctggccaacggcgagatccggaagcggcctctgatcgagacaaacggcgaaacaggcgagatcgtgtgggataagggccgggactttgccaccgtgcggaaagtgctgtctatgccccaagtgaatatcgtgaaaaagaccgaggtgcagacaggcggcttcagcaaagagtctatcctgcccaagaggaacagcgacaagctgatcgccagaaagaaggactgggaccctaagaagtacggcggcttcgacagccccaccgtggcctattctgtgctggtggtggccaaagtggaaaagggcaagtccaagaaactgaagagtgtgaaagagctgctggggatcaccatcatggaaagaagcagcttcgagaagaatcccatcgactttctggaagccaagggctacaaagaagtgaaaaaggacctgatcatcaagctgcctaagtactccctgttcgagctggaaaacggccggaagagaatgctggcctctgccggcgaactgcagaagggaaacgaactggccctgccctccaaatatgtgaacttcctgtacctggccagccactatgagaagctgaagggctcccccgaggataatgagcagaaacagctgtttgtggaacagcacaaacactacctggacgagatcatcgagcagatcagcgagttctccaagagagtgatcctggccgacgctaatctggacaaggtgctgagcgcctacaacaagcacagagacaagcctatcagagagcaggccgagaatatcatccacctgtttaccctgaccaatctgggagcccctgccgccttcaagtactttgacaccaccatcgaccggaagaggtacaccagcaccaaagaggtgctggacgccaccctgatccaccagagcatcaccggcctgtacgagacacggatcgacctgtctcagctgggaggcgacccaaaaaagaagagaaaggtaagcggaagtgagaccccaggtacatccgaatcagcaacgcctgaaagcaccggtcggacactggtgaccttcaaggatgtatttgtggacttcaccagggaggagtggaagctgctggacactgctcagcagatcgtgtacagaaatgtgatgctggagaactataagaacctggtttccttgggttatcagcttactaagccagatgtgatcctccggttggagaagggagaagagccc

SEQ ID NO: 1744 - protein, 2218 aa, synthetic construct
MNHDQEFDPPKVYPPVPAEKRKPIRVLSLFDGIATGLLVLKDLGIQVDRYIASEVCEDSITVGMVRHQGKIMYVGDVRSVTQKHIQEWGPFDLVIGGSPCNDLSIVNPARKGLYEGTGRLFFEFYRLLHDARPKEGDDRPFFWLFENVVAMGVSDKRDISRFLESNPVMIDAKEVSAAHRARYFWGNLPGMNRPLASTVNDKLELQECLEHGRIAKFSKVRTITTRSNSIKQGKDQHFPVFMNEKEDILWCTEMERVFGFPVHYTDVSNMSRLARQRLLGRSWSVPVIRHLFAPLKEYFACVSSGNSNANSRGPSFSSGLVPLSLRGSHMEVKANQRNIEDICICCGSLQVHTQHPLFEGGICAPCKDKFLDALFLYDDDGYQSYCSICCSGETLLICGNPDCTRCYCFECVDSLVGPGTSGKVHAMSNWVCYLCLPSSRSGLLQRRRKWRSQLKAFYDRESENPLEMFETVPVWRRQPVRVLSLFEDIKKELTSLGFLESGSDPGQLKHVVDVTDTVRKDVEEWGPFDLVYGATPPLGHTCDRPPSWYLFQFHRLLQYARPKPGSPRPFFWMFVDNLVLNKEDLDVASRFLEMEPVTIPDVHGGSLQNAVRVWSNIPAIRSRHWALVSEEELSLLAQNKQSSKLAAKWPTKLVKNCFLPLREYFKYFSTELTSSLGGPSSGAPPPSGGSPAGSPTSTEEGTSESATPESGPGTSTEPSEGSAPGSPAGSPTSTEEGTSTEPSEGSAPGTSTEPSEPKKKRKVMDKKYSIGLAIGTNSVGWAVITDEYKVPSKKFKVLGNTDRHSIKKNLIGALLFDSGETAEATRLKRTARRRYTRRKNRICYLQEIFSNEMAKVDDSFFHRLEESFLVEEDKKHERHPIFGNIVDEVAYHEKYPTIYHLRKKLVDSTDKADLRLIYLALAHMIKFRGHFLIEGDLNPDNSDVDKLFIQLVQTYNQLFEENPINASGVDAKAILSARLSKSRRLENLIAQLPGEKKNGLFGNLIALSLGLTPNFKSNFDLAEDAKLQLSKDTYDDDLDNLLAQIGDQYADLFLAAKNLSDAILLSDILRVNTEITKAPLSASMIKRYDEHHQDLTLLKALVRQQLPEKYKEIFFDQSKNGYAGYIDGGASQEEFYKFIKPILEKMDGTEELLVKLNREDLLRKQRTFDNGSIPHQIHLGELHAILRRQEDFYPFLKDNREKIEKILTFRIPYYVGPLARGNSRFAWMTRKSEETITPWNFEEVVDKGASAQSFIERMTNFDKNLPNEKVLPKHSLLYEYFTVYNELTKVKYVTEGMRKPAFLSGEQKKAIVDLLFKTNRKVTVKQLKEDYFKKIECFDSVEISGVEDRFNASLGTYHDLLKIIKDKDFLDNEENEDILEDIVLTLTLFEDREMIEERLKTYAHLFDDKVMKQLKRRRYTGWGRLSRKLINGIRDKQSGKTILDFLKSDGFANRNFMQLIHDDSLTFKEDIQKAQVSGQGDSLHEHIANLAGSPAIKKGILQTVKVVDELVKVMGRHKPENIVIEMARENQTTQKGQKNSRERMKRIEEGIKELGSQILKEHPVENTQLQNEKLYLYYLQNGRDMYVDQELDINRLSDYDVDAIVPQSFLKDDSIDNKVLTRSDKNRGKSDNVPSEEVVKKMKNYWRQLLNAKLITQRKFDNLTKAERGGLSELDKAGFIKRQLVETRQITKHVAQILDSRMNTKYDENDKLIREVKVITLKSKLVSDFRKDFQFYKVREINNYHHAHDAYLNAVVGTALIKKYPKLESEFVYGDYKVYDVRKMIAKSEQEIGKATAKYFFYSNIMNFFKTEITLANGEIRKRPLIETNGETGEIVWDKGRDFATVRKVLSMPQVNIVKKTEVQTGGFSKESILPKRNSDKLIARKKDWDPKKYGGFDSPTVAYSVLVVAKVEKGKSKKLKSVKELLGITIMERSSFEKNPIDFLEAKGYKEVKKDLIIKLPKYSLFELENGRKRMLASAGELQKGNELALPSKYVNFLYLASHYEKLKGSPEDNEQKQLFVEQHKHYLDEIIEQISEFSKRVILADANLDKVLSAYNKHRDKPIREQAENIIHLFTLTNLGAPAAFKYFDTTIDRKRYTSTKEVLDATLIHQSITGLYETRIDLSQLGGDPKKKRKVSGSETPGTSESATPESTGRTLVTFKDVFVDFTREEWKLLDTAQQIVYRNVMLENYKNLVSLGYQLTKPDVILRLEKGEEP

SEQ ID NO: 1745 - DNA, 6654 bp, synthetic construct
  source 1..6654: mol_type = other DNA
atgaaccatgatcaagaattcgacccacctaaagtctacccacctgtgcccgccgaaaaaaggaaacccataagggtgctgtcactctttgatggcatcgccactggtctcctggttcttaaggatctgggaattcaggtcgatcggtacattgctagcgaggtttgtgaggatagtattacagtgggtatggtgcgccaccagggaaagatcatgtatgttggtgacgttaggagcgtcacccagaaacatatccaggagtggggaccctttgatttggtgatcggaggtagtccctgcaatgacctttccatcgtgaatccagccaggaaagggctgtatgaagggactggtaggctctttttcgagttttatcgcctgcttcacgacgctagacctaaggaaggtgacgataggcctttcttttggctttttgagaacgtcgtggcaatgggagtctccgacaaaagggacatttctcgctttctggaatctaaccccgttatgatcgatgccaaggaagtttctgccgctcacagggcaaggtacttctggggcaatctgcccggaatgaatcgcccactggccagtaccgtgaatgacaaactggagctgcaggagtgcctggagcacggaagaatcgcaaagttttctaaagtcaggaccattaccactcgcagtaactccataaaacagggtaaggaccagcattttcccgtcttcatgaatgaaaaggaagatattctgtggtgcactgaaatggagagagttttcgggtttcccgtgcactataccgatgtttccaacatgtcccgccttgcaagacaaaggcttttgggccgctcttggtctgtgccagtgatccggcacttgtttgctcccctcaaagagtacttcgcttgcgtcagttccggaaattcaaacgctaactctcggggtccatctttctccagtggtctcgtgccactgtctctccggggctctcacatggaagtcaaggctaaccagcgaaatatagaagacatctgcatctgctgcggaagtctccaggttcacacacagcaccctctgtttgagggagggatctgcgccccatgtaaggacaagttcctggatgccctcttcctgtacgacgatgacgggtaccaatcctactgctccatctgctgctccggagagacgctgctcatctgcggaaaccctgattgcacccgatgctactgcttcgagtgtgtggatagcctggtcggccccgggacctcggggaaggtgcacgccatgagcaactgggtgtgctacctgtgcctgccgtcctcccgaagcgggctgctgcagcgtcggaggaagtggcgcagccagctcaaggccttctacgaccgagagtcggagaatcccctggagatgtttgagacagtgccagtctggcggaggcagcccgttcgcgttctctctctgttcgaagatattaaaaaggaactcacctcccttgggttcctggagagcgggagcgaccccggacagcttaagcacgtggtcgacgtgactgacaccgtccgcaaagacgtggaggaatggggccccttcgatctggtctatggggcaacccctccccttgggcatacatgtgatcggcctccatcctggtacctgttccagtttcacagactcctgcagtatgccaggccaaagccagggagcccaaggccctttttctggatgttcgtcgacaacctggtcctgaacaaagaagatctcgacgttgctagtcgctttctcgaaatggagcccgtgaccattcccgacgtgcatggcggttccctccagaatgcagtcagggtttggagcaatatccctgccatcaggtcaaggcactgggcactggtttcagaggaagagctgtccctccttgcccagaacaagcagtcatccaaactggcagccaagtggccaactaagctggtcaagaactgctttcttcccctcagagaatattttaagtatttcagtactgaactgactagcagtctgggagggccgagctctggcgcacccccaccaagtggagggtctcctgccgggtccccaacatctactgaagaaggcaccagcgaatccgcaacgcccgagtcaggccctggtacctccacagaaccatctgaaggtagtgcgcctggttccccagctggaagccctacttccaccgaagaaggcacgtcaaccgaaccaagtgaaggatctgcccctgggaccagcactgaaccatctgagccaaaaaagaagagaaaggtaatggacaagaagtacagcatcggcctggccatcggcaccaactctgtgggctgggccgtgatcaccgacgagtacaaggtgcccagcaagaaattcaaggtgctgggcaacaccgaccggcacagcatcaagaagaacctgatcggcgccctgctgttcgacagcggagaaacagccgaggccacccggctgaagagaaccgccagaagaagatacaccagacggaagaaccggatctgctatctgcaagagatcttcagcaacgagatggccaaggtggacgacagcttcttccacagactggaagagtccttcctggtggaagaggataagaagcacgagcggcaccccatcttcggcaacatcgtggacgaggtggcctaccacgagaagtaccccaccatctaccacctgagaaagaaactggtggacagcaccgacaaggccgacctgcggctgatctatctggccctggcccacatgatcaagttccggggccacttcctgatcgagggcgacctgaaccccgacaacagcgacgtggacaagctgttcatccagctggtgcagacctacaaccagctgttcgaggaaaaccccatcaacgccagcggcgtggacgccaaggccatcctgtctgccagactgagcaagagcagacggctggaaaatctgatcgcccagctgcccggcgagaagaagaatggcctgttcggcaacctgattgccctgagcctgggcctgacccccaacttcaagagcaacttcgacctggccgaggatgccaaactgcagctgagcaaggacacctacgacgacgacctggacaacctgctggcccagatcggcgaccagtacgccgacctgtttctggccgccaagaacctgtccgacgccatcctgctgagcgacatcctgagagtgaacaccgagatcaccaaggcccccctgagcgcctctatgatcaagagatacgacgagcaccaccaggacctgaccctgctgaaagctctcgtgcggcagcagctgcctgagaagtacaaagagattttcttcgaccagagcaagaacggctacgccggctacatcgatggcggagccagccaggaagagttctacaagttcatcaagcccatcctggaaaagatggacggcaccgaggaactgctcgtgaagctgaacagagaggacctgctgcggaagcagcggaccttcgacaacggcagcatcccccaccagatccacctgggagagctgcacgccattctgcggcggcaggaagatttttacccattcctgaaggacaaccgggaaaagatcgagaagatcctgaccttccgcatcccctactacgtgggccctctggccaggggaaacagcagattcgcctggatgaccagaaagagcgaggaaaccatcaccccctggaacttcgaggaagtggtggacaagggcgccagcgcccagagcttcatcgagcggatgaccaacttcgataagaacctgcccaacgagaaggtgctgcccaagcacagcctgctgtacgagtacttcaccgtgtacaacgagctgaccaaagtgaaatacgtgaccgagggaatgagaaagcccgccttcctgagcggcgagcagaaaaaagccatcgtggacctgctgttcaagaccaaccggaaagtgaccgtgaagcagctgaaagaggactacttcaagaaaatcgagtgcttcgactccgtggaaatctccggcgtggaagatcggttcaacgcctccctgggcacataccacgatctgctgaaaattatcaaggacaaggacttcctggacaatgaggaaaacgaggacattctggaagatatcgtgctgaccctgacactgtttgaggacagagagatgatcgaggaacggctgaaaacctatgcccacctgttcgacgacaaagtgatgaagcagctgaagcggcggagatacaccggctggggcaggctgagccggaagctgatcaacggcatccgggacaagcagtccggcaagacaatcctggatttcctgaagtccgacggcttcgccaacagaaacttcatgcagctgatccacgacgacagcctgacctttaaagaggacatccagaaagcccaggtgtccggccagggcgatagcctgcacgagcacattgccaatctggccggcagccccgccattaagaagggcatcctgcagacagtgaaggtggtggacgagctcgtgaaagtgatgggccggcacaagcccgagaacatcgtgatcgaaatggccagagagaaccagaccacccagaagggacagaagaacagccgcgagagaatgaagcggatcgaagagggcatcaaagagctgggcagccagatcctgaaagaacaccccgtggaaaacacccagctgcagaacgagaagctgtacctgtactacctgcagaatgggcgggatatgtacgtggaccaggaactggacatcaaccggctgtccgactacgatgtggacgctatcgtgcctcagagctttctgaaggacgactccatcgataacaaagtgctgactcggagcgacaagaaccggggcaagagcgacaacgtgccctccgaagaggtcgtgaagaagatgaagaactactggcgccagctgctgaatgccaagctgattacccagaggaagttcgacaatctgaccaaggccgagagaggcggcctgagcgaactggataaggccggcttcatcaagagacagctggtggaaacccggcagatcacaaagcacgtggcacagatcctggactcccggatgaacactaagtacgacgagaacgacaaactgatccgggaagtgaaagtgatcaccctgaagtccaagctggtgtccgatttccggaaggatttccagttttacaaagtgcgcgagatcaacaactaccaccacgcccacgacgcctacctgaacgccgtcgtgggaaccgccctgatcaaaaagtaccctaagctggaaagcgagttcgtgtacggcgactacaaggtgtacgacgtgcggaagatgatcgccaagagcgagcaggaaatcggcaaggctaccgccaagtacttcttctacagcaacatcatgaactttttcaagaccgagattaccctggccaacggcgagatccggaagcggcctctgatcgagacaaacggcgaaacaggcgagatcgtgtgggataagggccgggactttgccaccgtgcggaaagtgctgtctatgccccaagtgaatatcgtgaaaaagaccgaggtgcagacaggcggcttcagcaaagagtctatcctgcccaagaggaacagcgacaagctgatcgccagaaagaaggactgggaccctaagaagtacggcggcttcgacagccccaccgtggcctattctgtgctggtggtggccaaagtggaaaagggcaagtccaagaaactgaagagtgtgaaagagctgctggggatcaccatcatggaaagaagcagcttcgagaagaatcccatcgactttctggaagccaagggctacaaagaagtgaaaaaggacctgatcatcaagctgcctaagtactccctgttcgagctggaaaacggccggaagagaatgctggcctctgccggcgaactgcagaagggaaacgaactggccctgccctccaaatatgtgaacttcctgtacctggccagccactatgagaagctgaagggctcccccgaggataatgagcagaaacagctgtttgtggaacagcacaaacactacctggacgagatcatcgagcagatcagcgagttctccaagagagtgatcctggccgacgctaatctggacaaggtgctgagcgcctacaacaagcacagagacaagcctatcagagagcaggccgagaatatcatccacctgtttaccctgaccaatctgggagcccctgccgccttcaagtactttgacaccaccatcgaccggaagaggtacaccagcaccaaagaggtgctggacgccaccctgatccaccagagcatcaccggcctgtacgagacacggatcgacctgtctcagctgggaggcgacccaaaaaagaagagaaaggtaagcggaagtgagaccccaggtacatccgaatcagcaacgcctgaaagcaccggtcggacactggtgaccttcaaggatgtatttgtggacttcaccagggaggagtggaagctgctggacactgctcagcagatcgtgtacagaaatgtgatgctggagaactataagaacctggtttccttgggttatcagcttactaagccagatgtgatcctccggttggagaagggagaagagccc

SEQ ID NO: 1746 - protein, 2109 aa, synthetic construct
MPKKKRKVPKKKRKVNHDQEFDPPKVYPPVPAEKRKPIRVLSLFDGIATGLLVLKDLGIQVDRYIASEVCEDSITVGMVRHQGKIMYVGDVRSVTQKHIQEWGPFDLVIGGSPCNDLSIVNPARKGLYEGTGRLFFEFYRLLHDARPKEGDDRPFFWLFENVVAMGVSDKRDISRFLESNPVMIDAKEVSAAHRARYFWGNLPGMNRPLASTVNDKLELQECLEHGRIAKFSKVRTITTRSNSIKQGKDQHFPVFMNEKEDILWCTEMERVFGFPVHYTDVSNMSRLARQRLLGRSWSVPVIRHLFAPLKEYFACVSSGNSNANSRGPSFSSGLVPLSLRGSHNPLEMFETVPVWRRQPVRVLSLFEDIKKELTSLGFLESGSDPGQLKHVVDVTDTVRKDVEEWGPFDLVYGATPPLGHTCDRPPSWYLFQFHRLLQYARPKPGSPRPFFWMFVDNLVLNKEDLDVASRFLEMEPVTIPDVHGGSLQNAVRVWSNIPAIRSRHWALVSEEELSLLAQNKQSSKLAAKWPTKLVKNCFLPLREYFKYFSTELTSSLGGPSSGAPPPSGGSPAGSPTSTEEGTSESATPESGPGTSTEPSEGSAPGSPAGSPTSTEEGTSTEPSEGSAPGTSTEPSEMDKKYSIGLAIGTNSVGWAVITDEYKVPSKKFKVLGNTDRHSIKKNLIGALLFDSGETAEATRLKRTARRRYTRRKNRICYLQEIFSNEMAKVDDSFFHRLEESFLVEEDKKHERHPIFGNIVDEVAYHEKYPTIYHLRKKLVDSTDKADLRLIYLALAHMIKFRGHFLIEGDLNPDNSDVDKLFIQLVQTYNQLFEENPINASGVDAKAILSARLSKSRRLENLIAQLPGEKKNGLFGNLIALSLGLTPNFKSNFDLAEDAKLQLSKDTYDDDLDNLLAQIGDQYADLFLAAKNLSDAILLSDILRVNTEITKAPLSASMIKRYDEHHQDLTLLKALVRQQLPEKYKEIFFDQSKNGYAGYIDGGASQEEFYKFIKPILEKMDGTEELLVKLNREDLLRKQRTFDNGSIPHQIHLGELHAILRRQEDFYPFLKDNREKIEKILTFRIPYYVGPLARGNSRFAWMTRKSEETITPWNFEEVVDKGASAQSFIERMTNFDKNLPNEKVLPKHSLLYEYFTVYNELTKVKYVTEGMRKPAFLSGEQKKAIVDLLFKTNRKVTVKQLKEDYFKKIECFDSVEISGVEDRFNASLGTYHDLLKIIKDKDFLDNEENEDILEDIVLTLTLFEDREMIEERLKTYAHLFDDKVMKQLKRRRYTGWGRLSRKLINGIRDKQSGKTILDFLKSDGFANRNFMQLIHDDSLTFKEDIQKAQVSGQGDSLHEHIANLAGSPAIKKGILQTVKVVDELVKVMGRHKPENIVIEMARENQTTQKGQKNSRERMKRIEEGIKELGSQILKEHPVENTQLQNEKLYLYYLQNGRDMYVDQELDINRLSDYDVDAIVPQSFLKDDSIDNKVLTRSDKNRGKSDNVPSEEVVKKMKNYWRQLLNAKLITQRKFDNLTKAERGGLSELDKAGFIKRQLVETRQITKHVAQILDSRMNTKYDENDKLIREVKVITLKSKLVSDFRKDFQFYKVREINNYHHAHDAYLNAVVGTALIKKYPKLESEFVYGDYKVYDVRKMIAKSEQEIGKATAKYFFYSNIMNFFKTEITLANGEIRKRPLIETNGETGEIVWDKGRDFATVRKVLSMPQVNIVKKTEVQTGGFSKESILPKRNSDKLIARKKDWDPKKYGGFDSPTVAYSVLVVAKVEKGKSKKLKSVKELLGITIMERSSFEKNPIDFLEAKGYKEVKKDLIIKLPKYSLFELENGRKRMLASAGELQKGNELALPSKYVNFLYLASHYEKLKGSPEDNEQKQLFVEQHKHYLDEIIEQISEFSKRVILADANLDKVLSAYNKHRDKPIREQAENIIHLFTLTNLGAPAAFKYFDTTIDRKRYTSTKEVLDATLIHQSITGLYETRIDLSQLGGDSGSETPGTSESATPESTGRTLVTFKDVFVDFTREEWKLLDTAQQIVYRNVMLENYKNLVSLGYQLTKPDVILRLEKGEEPSADYKDDDDKAPKKKRKVPKKKRKV

SEQ ID NO: 1747 - DNA, 6327 bp, synthetic construct
  source 1..6327: mol_type = other DNA
atgccaaaaaagaagagaaaggtaccgaagaaaaaaagaaaggtcaaccacgaccaggaattcgaccctccaaaggtttacccacctgtcccagctgagaagaggaagcccatccgggtgctgtctctctttgatggaatcgctacagggctcctggtgctgaaggacttgggcattcaggtggaccgctacattgcctcggaggtgtgtgaggactccatcacggtgggcatggtgcggcaccaggggaagatcatgtacgtcggggacgtccgcagcgtcacacagaagcatatccaggagtggggcccattcgatctggtgattgggggcagtccctgcaatgacctctccatcgtcaaccctgctcgcaagggcctctacgagggcactggccggctcttctttgagttctaccgcctcctgcatgatgcgcggcccaaggagggagatgatcgccccttcttctggctctttgagaatgtggtggccatgggcgttagtgacaagagggacatctcgcgatttctcgagtccaaccctgtgatgattgatgccaaagaagtgtcagctgcacacagggcccgctacttctggggtaaccttcccggtatgaacaggccgttggcatccactgtgaatgataagctggagctgcaggagtgtctggagcatggcaggatagccaagttcagcaaagtgaggaccattactacgaggtcaaactccataaagcagggcaaagaccagcattttcctgtcttcatgaatgagaaagaggacatcttatggtgcactgaaatggaaagggtatttggtttcccagtccactatactgacgtctccaacatgagccgcttggcgaggcagagactgctgggccggtcatggagcgtgccagtcatccgccacctcttcgctccgctgaaggagtattttgcgtgtgtgtctagcggcaatagtaacgctaacagccgcgggccgagcttcagcagcggcctggtgccgttaagcttgcgcggcagccataatccccttgagatgttcgaaaccgtgcctgtgtggaggagacagccagtccgggtgctgtccctttttgaagacatcaagaaagagctgacgagtttgggctttttggaaagtggttctgacccgggacaactgaagcatgtggttgatgtcacagacacagtgaggaaggatgtggaggagtggggacccttcgatcttgtgtacggcgccacacctcccctgggccacacctgtgaccgtcctcccagctggtacctgttccagttccaccggctcctgcagtacgcacggcccaagccaggcagccccaggcccttcttctggatgttcgtggacaatctggtgctgaacaaggaagacctggacgtcgcatctcgcttcctggagatggagccagtcaccatcccagatgtccacggcggatccttgcagaatgctgtccgcgtgtggagcaacatcccagccataaggagcaggcactgggctctggtttcggaagaagaattgtccctgctggcccagaacaagcagagctcgaagctcgcggccaagtggcccaccaagctggtgaagaactgctttctccccctaagagaatatttcaagtatttttcaacagaactcacttcctctttaggagggccgagctctggcgcacccccaccaagtggagggtctcctgccgggtccccaacatctactgaagaaggcaccagcgaatccgcaacgcccgagtcaggccctggtacctccacagaaccatctgaaggtagtgcgcctggttccccagctggaagccctacttccaccgaagaaggcacgtcaaccgaaccaagtgaaggatctgcccctgggaccagcactgaaccatctgagatggacaagaagtacagcatcggcctggccatcggcaccaactctgtgggctgggccgtgatcaccgacgagtacaaggtgcccagcaagaaattcaaggtgctgggcaacaccgaccggcacagcatcaagaagaacctgatcggcgccctgctgttcgacagcggagaaacagccgaggccacccggctgaagagaaccgccagaagaagatacaccagacggaagaaccggatctgctatctgcaagagatcttcagcaacgagatggccaaggtggacgacagcttcttccacagactggaagagtccttcctggtggaagaggataagaagcacgagcggcaccccatcttcggcaacatcgtggacgaggtggcctaccacgagaagtaccccaccatctaccacctgagaaagaaactggtggacagcaccgacaaggccgacctgcggctgatctatctggccctggcccacatgatcaagttccggggccacttcctgatcgagggcgacctgaaccccgacaacagcgacgtggacaagctgttcatccagctggtgcagacctacaaccagctgttcgaggaaaaccccatcaacgccagcggcgtggacgccaaggccatcctgtctgccagactgagcaagagcagacggctggaaaatctgatcgcccagctgcccggcgagaagaagaatggcctgttcggcaacctgattgccctgagcctgggcctgacccccaacttcaagagcaacttcgacctggccgaggatgccaaactgcagctgagcaaggacacctacgacgacgacctggacaacctgctggcccagatcggcgaccagtacgccgacctgtttctggccgccaagaacctgtccgacgccatcctgctgagcgacatcctgagagtgaacaccgagatcaccaaggcccccctgagcgcctctatgatcaagagatacgacgagcaccaccaggacctgaccctgctgaaagctctcgtgcggcagcagctgcctgagaagtacaaagagattttcttcgaccagagcaagaacggctacgccggctacatcgatggcggagccagccaggaagagttctacaagttcatcaagcccatcctggaaaagatggacggcaccgaggaactgctcgtgaagctgaacagagaggacctgctgcggaagcagcggaccttcgacaacggcagcatcccccaccagatccacctgggagagctgcacgccattctgcggcggcaggaagatttttacccattcctgaaggacaaccgggaaaagatcgagaagatcctgaccttccgcatcccctactacgtgggccctctggccaggggaaacagcagattcgcctggatgaccagaaagagcgaggaaaccatcaccccctggaacttcgaggaagtggtggacaagggcgccagcgcccagagcttcatcgagcggatgaccaacttcgataagaacctgcccaacgagaaggtgctgcccaagcacagcctgctgtacgagtacttcaccgtgtacaacgagctgaccaaagtgaaatacgtgaccgagggaatgagaaagcccgccttcctgagcggcgagcagaaaaaagccatcgtggacctgctgttcaagaccaaccggaaagtgaccgtgaagcagctgaaagaggactacttcaagaaaatcgagtgcttcgactccgtggaaatctccggcgtggaagatcggttcaacgcctccctgggcacataccacgatctgctgaaaattatcaaggacaaggacttcctggacaatgaggaaaacgaggacattctggaagatatcgtgctgaccctgacactgtttgaggacagagagatgatcgaggaacggctgaaaacctatgcccacctgttcgacgacaaagtgatgaagcagctgaagcggcggagatacaccggctggggcaggctgagccggaagctgatcaacggcatccgggacaagcagtccggcaagacaatcctggatttcctgaagtccgacggcttcgccaacagaaacttcatgcagctgatccacgacgacagcctgacctttaaagaggacatccagaaagcccaggtgtccggccagggcgatagcctgcacgagcacattgccaatctggccggcagccccgccattaagaagggcatcctgcagacagtgaaggtggtggacgagctcgtgaaagtgatgggccggcacaagcccgagaacatcgtgatcgaaatggccagagagaaccagaccacccagaagggacagaagaacagccgcgagagaatgaagcggatcgaagagggcatcaaagagctgggcagccagatcctgaaagaacaccccgtggaaaacacccagctgcagaacgagaagctgtacctgtactacctgcagaatgggcgggatatgtacgtggaccaggaactggacatcaaccggctgtccgactacgatgtggacgctatcgtgcctcagagctttctgaaggacgactccatcgataacaaagtgctgactcggagcgacaagaaccggggcaagagcgacaacgtgccctccgaagaggtcgtgaagaagatgaagaactactggcgccagctgctgaatgccaagctgattacccagaggaagttcgacaatctgaccaaggccgagagaggcggcctgagcgaactggataaggccggcttcatcaagagacagctggtggaaacccggcagatcacaaagcacgtggcacagatcctggactcccggatgaacactaagtacgacgagaacgacaaactgatccgggaagtgaaagtgatcaccctgaagtccaagctggtgtccgatttccggaaggatttccagttttacaaagtgcgcgagatcaacaactaccaccacgcccacgacgcctacctgaacgccgtcgtgggaaccgccctgatcaaaaagtaccctaagctggaaagcgagttcgtgtacggcgactacaaggtgtacgacgtgcggaagatgatcgccaagagcgagcaggaaatcggcaaggctaccgccaagtacttcttctacagcaacatcatgaactttttcaagaccgagattaccctggccaacggcgagatccggaagcggcctctgatcgagacaaacggcgaaacaggcgagatcgtgtgggataagggccgggactttgccaccgtgcggaaagtgctgtctatgccccaagtgaatatcgtgaaaaagaccgaggtgcagacaggcggcttcagcaaagagtctatcctgcccaagaggaacagcgacaagctgatcgccagaaagaaggactgggaccctaagaagtacggcggcttcgacagccccaccgtggcctattctgtgctggtggtggccaaagtggaaaagggcaagtccaagaaactgaagagtgtgaaagagctgctggggatcaccatcatggaaagaagcagcttcgagaagaatcccatcgactttctggaagccaagggctacaaagaagtgaaaaaggacctgatcatcaagctgcctaagtactccctgttcgagctggaaaacggccggaagagaatgctggcctctgccggcgaactgcagaagggaaacgaactggccctgccctccaaatatgtgaacttcctgtacctggccagccactatgagaagctgaagggctcccccgaggataatgagcagaaacagctgtttgtggaacagcacaaacactacctggacgagatcatcgagcagatcagcgagttctccaagagagtgatcctggccgacgctaatctggacaaggtgctgagcgcctacaacaagcacagagacaagcctatcagagagcaggccgagaatatcatccacctgtttaccctgaccaatctgggagcccctgccgccttcaagtactttgacaccaccatcgaccggaagaggtacaccagcaccaaagaggtgctggacgccaccctgatccaccagagcatcaccggcctgtacgagacacggatcgacctgtctcagctgggaggcgacagcggaagtgagaccccaggtacatccgaatcagcaacgcctgaaagcaccggtcggacactggtgaccttcaaggatgtatttgtggacttcaccagggaggagtggaagctgctggacactgctcagcagatcgtgtacagaaatgtgatgctggagaactataagaacctggtttccttgggttatcagcttactaagccagatgtgatcctccggttggagaagggagaagagcccagcgctgattacaaagatgatgacgataaagccccaaaaaagaagagaaaggtaccgaagaaaaaaagaaaggtc

SEQ ID NO: 1748 - protein, 2111 aa, synthetic construct
MPKKKRKVPKKKRKVNHDQEFDPPKVYPPVPAEKRKPIRVLSLFDGIATGLLVLKDLGIQVDRYIASEVCEDSITVGMVRHQGKIMYVGDVRSVTQKHIQEWGPFDLVIGGSPCNDLSIVNPARKGLYEGTGRLFFEFYRLLHDARPKEGDDRPFFWLFENVVAMGVSDKRDISRFLESNPVMIDAKEVSAAHRARYFWGNLPGMNRPLASTVNDKLELQECLEHGRIAKFSKVRTITTRSNSIKQGKDQHFPVFMNEKEDILWCTEMERVFGFPVHYTDVSNMSRLARQRLLGRSWSVPVIRHLFAPLKEYFACVSSGNSNANSRGPSFSSGLVPLSLRGSHMGPMEIYKTVSAWKRQPVRVLSLFRNIDKVLKSLGFLESGSGSGGGTLKYVEDVTNVVRRDVEKWGPFDLVYGSTQPLGSSCDRCPGWYMFQFHRILQYALPRQESQRPFFWIFMDNLLLTEDDQETTTRFLQTEAVTLQDVRGRDYQNAMRVWSNIPGLKSKHAPLTPKEEEYLQAQVRSRSKLDAPKVDLLVKNCLLPLREYFKYFSQNSLPLGGPSSGAPPPSGGSPAGSPTSTEEGTSESATPESGPGTSTEPSEGSAPGSPAGSPTSTEEGTSTEPSEGSAPGTSTEPSEMDKKYSIGLAIGTNSVGWAVITDEYKVPSKKFKVLGNTDRHSIKKNLIGALLFDSGETAEATRLKRTARRRYTRRKNRICYLQEIFSNEMAKVDDSFFHRLEESFLVEEDKKHERHPIFGNIVDEVAYHEKYPTIYHLRKKLVDSTDKADLRLIYLALAHMIKFRGHFLIEGDLNPDNSDVDKLFIQLVQTYNQLFEENPINASGVDAKAILSARLSKSRRLENLIAQLPGEKKNGLFGNLIALSLGLTPNFKSNFDLAEDAKLQLSKDTYDDDLDNLLAQIGDQYADLFLAAKNLSDAILLSDILRVNTEITKAPLSASMIKRYDEHHQDLTLLKALVRQQLPEKYKEIFFDQSKNGYAGYIDGGASQEEFYKFIKPILEKMDGTEELLVKLNREDLLRKQRTFDNGSIPHQIHLGELHAILRRQEDFYPFLKDNREKIEKILTFRIPYYVGPLARGNSRFAWMTRKSEETITPWNFEEVVDKGASAQSFIERMTNFDKNLPNEKVLPKHSLLYEYFTVYNELTKVKYVTEGMRKPAFLSGEQKKAIVDLLFKTNRKVTVKQLKEDYFKKIECFDSVEISGVEDRFNASLGTYHDLLKIIKDKDFLDNEENEDILEDIVLTLTLFEDREMIEERLKTYAHLFDDKVMKQLKRRRYTGWGRLSRKLINGIRDKQSGKTILDFLKSDGFANRNFMQLIHDDSLTFKEDIQKAQVSGQGDSLHEHIANLAGSPAIKKGILQTVKVVDELVKVMGRHKPENIVIEMARENQTTQKGQKNSRERMKRIEEGIKELGSQILKEHPVENTQLQNEKLYLYYLQNGRDMYVDQELDINRLSDYDVDAIVPQSFLKDDSIDNKVLTRSDKNRGKSDNVPSEEVVKKMKNYWRQLLNAKLITQRKFDNLTKAERGGLSELDKAGFIKRQLVETRQITKHVAQILDSRMNTKYDENDKLIREVKVITLKSKLVSDFRKDFQFYKVREINNYHHAHDAYLNAVVGTALIKKYPKLESEFVYGDYKVYDVRKMIAKSEQEIGKATAKYFFYSNIMNFFKTEITLANGEIRKRPLIETNGETGEIVWDKGRDFATVRKVLSMPQVNIVKKTEVQTGGFSKESILPKRNSDKLIARKKDWDPKKYGGFDSPTVAYSVLVVAKVEKGKSKKLKSVKELLGITIMERSSFEKNPIDFLEAKGYKEVKKDLIIKLPKYSLFELENGRKRMLASAGELQKGNELALPSKYVNFLYLASHYEKLKGSPEDNEQKQLFVEQHKHYLDEIIEQISEFSKRVILADANLDKVLSAYNKHRDKPIREQAENIIHLFTLTNLGAPAAFKYFDTTIDRKRYTSTKEVLDATLIHQSITGLYETRIDLSQLGGDSGSETPGTSESATPESTGRTLVTFKDVFVDFTREEWKLLDTAQQIVYRNVMLENYKNLVSLGYQLTKPDVILRLEKGEEPSADYKDDDDKAPKKKRKVPKKKRKV

SEQ ID NO: 1749 - DNA, 6336 bp, synthetic construct
  source 1..6336: mol_type = other DNA
atgccaaaaaagaagagaaaggtaccgaagaaaaaaagaaaggtatacaaccatgaccaggaattcgaccccccaaaggtttacccacctgtgccagctgagaagaggaagcccatccgcgtgctgtctctctttgatgggattgctacagggctcctggtgctgaaggacctgggcatccaagtggaccgctacattgcctccgaggtgtgtgaggactccatcacggtgggcatggtgcggcaccagggaaagatcatgtacgtcggggacgtccgcagcgtcacacagaagcatatccaggagtggggcccattcgacctggtgattggaggcagtccctgcaatgacctctccattgtcaaccctgcccgcaagggactttatgagggtactggccgcctcttctttgagttctaccgcctcctgcatgatgcgcggcccaaggagggagatgatcgccccttcttctggctctttgagaatgtggtggccatgggcgttagtgacaagagggacatctcgcgatttcttgagtctaaccccgtgatgattgacgccaaagaagtgtctgctgcacacagggcccgttacttctggggtaaccttcctggcatgaacaggcctttggcatccactgtgaatgataagctggagctgcaagagtgtctggagcacggcagaatagccaagttcagcaaagtgaggaccattaccaccaggtcaaactctataaagcagggcaaagaccagcatttccccgtcttcatgaacgagaaggaggacatcctgtggtgcactgaaatggaaagggtgtttggcttccccgtccactacacagacgtctccaacatgagccgcttggcgaggcagagactgctgggccgatcgtggagcgtgccggtcatccgccacctcttcgctccgctgaaggaatattttgcttgtgtgtctagcggcaatagtaacgctaacagccgcgggccgagcttcagcagcggcctggtgccgttaagcttgcgcggcagccatatgggccctatggagatatacaagacagtgtctgcatggaagagacagccagtgcgggtactgagcctcttcagaaacatcgacaaggtactaaagagtttgggcttcttggaaagcggttctggttctgggggaggaacgctgaagtacgtggaagatgtcacaaatgtcgtgaggagagacgtggagaaatggggcccctttgacctggtgtacggctcgacgcagcccctaggcagctcttgtgatcgctgtcccggctggtacatgttccagttccaccggatcctgcagtatgcgctgcctcgccaggagagtcagcggcccttcttctggatattcatggacaatctgctgctgactgaggatgaccaagagacaactacccgcttccttcagacagaggctgtgaccctccaggatgtccgtggcagagactaccagaatgctatgcgggtgtggagcaacattccagggctgaagagcaagcatgcgcccctgaccccaaaggaagaagagtatctgcaagcccaagtcagaagcaggagcaagctggacgccccgaaagttgacctcctggtgaagaactgccttctcccgctgagagagtacttcaagtatttttctcaaaactcacttcctcttggagggccgagctctggcgcacccccaccaagtggagggtctcctgccgggtccccaacatctactgaagaaggcaccagcgaatccgcaacgcccgagtcaggccctggtacctccacagaaccatctgaaggtagtgcgcctggttccccagctggaagccctacttccaccgaagaaggcacgtcaaccgaaccaagtgaaggatctgcccctgggaccagcactgaaccatctgagatggacaagaagtacagcatcggcctggccatcggcaccaactctgtgggctgggccgtgatcaccgacgagtacaaggtgcccagcaagaaattcaaggtgctgggcaacaccgaccggcacagcatcaagaagaacctgatcggcgccctgctgttcgacagcggagaaacagccgaggccacccggctgaagagaaccgccagaagaagatacaccagacggaagaaccggatctgctatctgcaagagatcttcagcaacgagatggccaaggtggacgacagcttcttccacagactggaagagtccttcctggtggaagaggataagaagcacgagcggcaccccatcttcggcaacatcgtggacgaggtggcctaccacgagaagtaccccaccatctaccacctgagaaagaaactggtggacagcaccgacaaggccgacctgcggctgatctatctggccctggcccacatgatcaagttccggggccacttcctgatcgagggcgacctgaaccccgacaacagcgacgtggacaagctgttcatccagctggtgcagacctacaaccagctgttcgaggaaaaccccatcaacgccagcggcgtggacgccaaggccatcctgtctgccagactgagcaagagcagacggctggaaaatctgatcgcccagctgcccggcgagaagaagaatggcctgttcggcaacctgattgccctgagcctgggcctgacccccaacttcaagagcaacttcgacctggccgaggatgccaaactgcagctgagcaaggacacctacgacgacgacctggacaacctgctggcccagatcggcgaccagtacgccgacctgtttctggccgccaagaacctgtccgacgccatcctgctgagcgacatcctgagagtgaacaccgagatcaccaaggcccccctgagcgcctctatgatcaagagatacgacgagcaccaccaggacctgaccctgctgaaagctctcgtgcggcagcagctgcctgagaagtacaaagagattttcttcgaccagagcaagaacggctacgccggctacatcgatggcggagccagccaggaagagttctacaagttcatcaagcccatcctggaaaagatggacggcaccgaggaactgctcgtgaagctgaacagagaggacctgctgcggaagcagcggaccttcgacaacggcagcatcccccaccagatccacctgggagagctgcacgccattctgcggcggcaggaagatttttacccattcctgaaggacaaccgggaaaagatcgagaagatcctgaccttccgcatcccctactacgtgggccctctggccaggggaaacagcagattcgcctggatgaccagaaagagcgaggaaaccatcaccccctggaacttcgaggaagtggtggacaagggcgccagcgcccagagcttcatcgagcggatgaccaacttcgataagaacctgcccaacgagaaggtgctgcccaagcacagcctgctgtacgagtacttcaccgtgtacaacgagctgaccaaagtgaaatacgtgaccgagggaatgagaaagcccgccttcctgagcggcgagcagaaaaaagccatcgtggacctgctgttcaagaccaaccggaaagtgaccgtgaagcagctgaaagaggactacttcaagaaaatcgagtgcttcgactccgtggaaatctccggcgtggaagatcggttcaacgcctccctgggcacataccacgatctgctgaaaattatcaaggacaaggacttcctggacaatgaggaaaacgaggacattctggaagatatcgtgctgaccctgacactgtttgaggacagagagatgatcgaggaacggctgaaaacctatgcccacctgttcgacgacaaagtgatgaagcagctgaagcggcggagatacaccggctggggcaggctgagccggaagctgatcaacggcatccgggacaagcagtccggcaagacaatcctggatttcctgaagtccgacggcttcgccaacagaaacttcatgcagctgatccacgacgacagcctgacctttaaagaggacatccagaaagcccaggtgtccggccagggcgatagcctgcacgagcacattgccaatctggccggcagccccgccattaagaagggcatcctgcagacagtgaaggtggtggacgagctcgtgaaagtgatgggccggcacaagcccgagaacatcgtgatcgaaatggccagagagaaccagaccacccagaagggacagaagaacagccgcgagagaatgaagcggatcgaagagggcatcaaagagctgggcagccagatcctgaaagaacaccccgtggaaaacacccagctgcagaacgagaagctgtacctgtactacctgcagaatgggcgggatatgtacgtggaccaggaactggacatcaaccggctgtccgactacgatgtggacgctatcgtgcctcagagctttctgaaggacgactccatcgataacaaagtgctgactcggagcgacaagaaccggggcaagagcgacaacgtgccctccgaagaggtcgtgaagaagatgaagaactactggcgccagctgctgaatgccaagctgattacccagaggaagttcgacaatctgaccaaggccgagagaggcggcctgagcgaactggataaggccggcttcatcaagagacagctggtggaaacccggcagatcacaaagcacgtggcacagatcctggactcccggatgaacactaagtacgacgagaacgacaaactgatccgggaagtgaaagtgatcaccctgaagtccaagctggtgtccgatttccggaaggatttccagttttacaaagtgcgcgagatcaacaactaccaccacgcccacgacgcctacctgaacgccgtcgtgggaaccgccctgatcaaaaagtaccctaagctggaaagcgagttcgtgtacggcgactacaaggtgtacgacgtgcggaagatgatcgccaagagcgagcaggaaatcggcaaggctaccgccaagtacttcttctacagcaacatcatgaactttttcaagaccgagattaccctggccaacggcgagatccggaagcggcctctgatcgagacaaacggcgaaacaggcgagatcgtgtgggataagggccgggactttgccaccgtgcggaaagtgctgtctatgccccaagtgaatatcgtgaaaaagaccgaggtgcagacaggcggcttcagcaaagagtctatcctgcccaagaggaacagcgacaagctgatcgccagaaagaaggactgggaccctaagaagtacggcggcttcgacagccccaccgtggcctattctgtgctggtggtggccaaagtggaaaagggcaagtccaagaaactgaagagtgtgaaagagctgctggggatcaccatcatggaaagaagcagcttcgagaagaatcccatcgactttctggaagccaagggctacaaagaagtgaaaaaggacctgatcatcaagctgcctaagtactccctgttcgagctggaaaacggccggaagagaatgctggcctctgccggcgaactgcagaagggaaacgaactggccctgccctccaaatatgtgaacttcctgtacctggccagccactatgagaagctgaagggctcccccgaggataatgagcagaaacagctgtttgtggaacagcacaaacactacctggacgagatcatcgagcagatcagcgagttctccaagagagtgatcctggccgacgctaatctggacaaggtgctgagcgcctacaacaagcacagagacaagcctatcagagagcaggccgagaatatcatccacctgtttaccctgaccaatctgggagcccctgccgccttcaagtactttgacaccaccatcgaccggaagaggtacaccagcaccaaagaggtgctggacgccaccctgatccaccagagcatcaccggcctgtacgagacacggatcgacctgtctcagctgggaggcgacagcggaagtgagaccccaggtacatccgaatcagcaacgcctgaaagcaccggtcggacactggtgaccttcaaggatgtatttgtggacttcaccagggaggagtggaagctgctggacactgctcagcagatcgtgtacagaaatgtgatgctggagaactataagaacctggtttccttgggttatcagcttactaagccagatgtgatcctccggttggagaagggagaagagcccagcgctgattacaaagatgatgacgataaagccccaaaaaagaagagaaaggtaccgaagaaaaaaagaaaggtc

SEQ ID NO: 1750 - protein, 2149 aa, synthetic construct
MPKKKRKVPKKKRKVNHDQEFDPPKVYPPVPAEKRKPIRVLSLFDGIATGLLVLKDLGIQVDRYIASEVCEDSITVGMVRHQGKIMYVGDVRSVTQKHIQEWGPFDLVIGGSPCNDLSIVNPARKGLYEGTGRLFFEFYRLLHDARPKEGDDRPFFWLFENVVAMGVSDKRDISRFLESNPVMIDAKEVSAAHRARYFWGNLPGMNRPLASTVNDKLELQECLEHGRIAKFSKVRTITTRSNSIKQGKDQHFPVFMNEKEDILWCTEMERVFGFPVHYTDVSNMSRLARQRLLGRSWSVPVIRHLFAPLKEYFACVSSGNSNANSRGPSFSSGLVPLSLRGSHMGPMEIYKTVSAWKRQPVRVLSLFRNIDKVLKSLGFLESGSGSGGGTLKYVEDVTNVVRRDVEKWGPFDLVYGSTQPLGSSCDRCPGWYMFQFHRILQYALPRQESQRPFFWIFMDNLLLTEDDQETTTRFLQTEAVTLQDVRGRDYQNAMRVWSNIPGLKSKHAPLTPKEEEYLQAQVRSRSKLDAPKVDLLVKNCLLPLREYFKYFSQNSLPLGGPSSGAPPPSGGSPAGSPTSTEEGTSESATPESGPGTSTEPSEGSAPGSPAGSPTSTEEGTSTEPSEGSAPGTSTEPSEMDKKYSIGLAIGTNSVGWAVITDEYKVPSKKFKVLGNTDRHSIKKNLIGALLFDSGETAEATRLKRTARRRYTRRKNRICYLQEIFSNEMAKVDDSFFHRLEESFLVEEDKKHERHPIFGNIVDEVAYHEKYPTIYHLRKKLVDSTDKADLRLIYLALAHMIKFRGHFLIEGDLNPDNSDVDKLFIQLVQTYNQLFEENPINASGVDAKAILSARLSKSRRLENLIAQLPGEKKNGLFGNLIALSLGLTPNFKSNFDLAEDAKLQLSKDTYDDDLDNLLAQIGDQYADLFLAAKNLSDAILLSDILRVNTEITKAPLSASMIKRYDEHHQDLTLLKALVRQQLPEKYKEIFFDQSKNGYAGYIDGGASQEEFYKFIKPILEKMDGTEELLVKLNREDLLRKQRTFDNGSIPHQIHLGELHAILRRQEDFYPFLKDNREKIEKILTFRIPYYVGPLARGNSRFAWMTRKSEETITPWNFEEVVDKGASAQSFIERMTNFDKNLPNEKVLPKHSLLYEYFTVYNELTKVKYVTEGMRKPAFLSGEQKKAIVDLLFKTNRKVTVKQLKEDYFKKIECFDSVEISGVEDRFNASLGTYHDLLKIIKDKDFLDNEENEDILEDIVLTLTLFEDREMIEERLKTYAHLFDDKVMKQLKRRRYTGWGRLSRKLINGIRDKQSGKTILDFLKSDGFANRNFMQLIHDDSLTFKEDIQKAQVSGQGDSLHEHIANLAGSPAIKKGILQTVKVVDELVKVMGRHKPENIVIEMARENQTTQKGQKNSRERMKRIEEGIKELGSQILKEHPVENTQLQNEKLYLYYLQNGRDMYVDQELDINRLSDYDVDAIVPQSFLKDDSIDNKVLTRSDKNRGKSDNVPSEEVVKKMKNYWRQLLNAKLITQRKFDNLTKAERGGLSELDKAGFIKRQLVETRQITKHVAQILDSRMNTKYDENDKLIREVKVITLKSKLVSDFRKDFQFYKVREINNYHHAHDAYLNAVVGTALIKKYPKLESEFVYGDYKVYDVRKMIAKSEQEIGKATAKYFFYSNIMNFFKTEITLANGEIRKRPLIETNGETGEIVWDKGRDFATVRKVLSMPQVNIVKKTEVQTGGFSKESILPKRNSDKLIARKKDWDPKKYGGFDSPTVAYSVLVVAKVEKGKSKKLKSVKELLGITIMERSSFEKNPIDFLEAKGYKEVKKDLIIKLPKYSLFELENGRKRMLASAGELQKGNELALPSKYVNFLYLASHYEKLKGSPEDNEQKQLFVEQHKHYLDEIIEQISEFSKRVILADANLDKVLSAYNKHRDKPIREQAENIIHLFTLTNLGAPAAFKYFDTTIDRKRYTSTKEVLDATLIHQSITGLYETRIDLSQLGGDSGSETPGTSESATPESTGMNNSQGRVTFEDVTVNFTQGEWQRLNPEQRNLYRDVMLENYSNLVSVGQGETTKPDVILRLEQGKEPWLEEEEVLGSGRAEKNGDIGGQIWKPKDVKESLSADYKDDDDKAPKKKRKVPKKKRKV

SEQ ID NO: 1751 - DNA, 6450 bp, synthetic construct
  source 1..6450: mol_type = other DNA
atgccaaaaaagaagagaaaggtaccgaagaaaaaaagaaaggtatacaaccatgaccaggaattcgaccccccaaaggtttacccacctgtgccagctgagaagaggaagcccatccgcgtgctgtctctctttgatgggattgctacagggctcctggtgctgaaggacctgggcatccaagtggaccgctacattgcctccgaggtgtgtgaggactccatcacggtgggcatggtgcggcaccagggaaagatcatgtacgtcggggacgtccgcagcgtcacacagaagcatatccaggagtggggcccattcgacctggtgattggaggcagtccctgcaatgacctctccattgtcaaccctgcccgcaagggactttatgagggtactggccgcctcttctttgagttctaccgcctcctgcatgatgcgcggcccaaggagggagatgatcgccccttcttctggctctttgagaatgtggtggccatgggcgttagtgacaagagggacatctcgcgatttcttgagtctaaccccgtgatgattgacgccaaagaagtgtctgctgcacacagggcccgttacttctggggtaaccttcctggcatgaacaggcctttggcatccactgtgaatgataagctggagctgcaagagtgtctggagcacggcagaatagccaagttcagcaaagtgaggaccattaccaccaggtcaaactctataaagcagggcaaagaccagcatttccccgtcttcatgaacgagaaggaggacatcctgtggtgcactgaaatggaaagggtgtttggcttccccgtccactacacagacgtctccaacatgagccgcttggcgaggcagagactgctgggccgatcgtggagcgtgccggtcatccgccacctcttcgctccgctgaaggaatattttgcttgtgtgtctagcggcaatagtaacgctaacagccgcgggccgagcttcagcagcggcctggtgccgttaagcttgcgcggcagccatatgggccctatggagatatacaagacagtgtctgcatggaagagacagccagtgcgggtactgagcctcttcagaaacatcgacaaggtactaaagagtttgggcttcttggaaagcggttctggttctgggggaggaacgctgaagtacgtggaagatgtcacaaatgtcgtgaggagagacgtggagaaatggggcccctttgacctggtgtacggctcgacgcagcccctaggcagctcttgtgatcgctgtcccggctggtacatgttccagttccaccggatcctgcagtatgcgctgcctcgccaggagagtcagcggcccttcttctggatattcatggacaatctgctgctgactgaggatgaccaagagacaactacccgcttccttcagacagaggctgtgaccctccaggatgtccgtggcagagactaccagaatgctatgcgggtgtggagcaacattccagggctgaagagcaagcatgcgcccctgaccccaaaggaagaagagtatctgcaagcccaagtcagaagcaggagcaagctggacgccccgaaagttgacctcctggtgaagaactgccttctcccgctgagagagtacttcaagtatttttctcaaaactcacttcctcttggagggccgagctctggcgcacccccaccaagtggagggtctcctgccgggtccccaacatctactgaagaaggcaccagcgaatccgcaacgcccgagtcaggccctggtacctccacagaaccatctgaaggtagtgcgcctggttccccagctggaagccctacttccaccgaagaaggcacgtcaaccgaaccaagtgaaggatctgcccctgggaccagcactgaaccatctgagatggacaagaagtacagcatcggcctggccatcggcaccaactctgtgggctgggccgtgatcaccgacgagtacaaggtgcccagcaagaaattcaaggtgctgggcaacaccgaccggcacagcatcaagaagaacctgatcggcgccctgctgttcgacagcggagaaacagccgaggccacccggctgaagagaaccgccagaagaagatacaccagacggaagaaccggatctgctatctgcaagagatcttcagcaacgagatggccaaggtggacgacagcttcttccacagactggaagagtccttcctggtggaagaggataagaagcacgagcggcaccccatcttcggcaacatcgtggacgaggtggcctaccacgagaagtaccccaccatctaccacctgagaaagaaactggtggacagcaccgacaaggccgacctgcggctgatctatctggccctggcccacatgatcaagttccggggccacttcctgatcgagggcgacctgaaccccgacaacagcgacgtggacaagctgttcatccagctggtgcagacctacaaccagctgttcgaggaaaaccccatcaacgccagcggcgtggacgccaaggccatcctgtctgccagactgagcaagagcagacggctggaaaatctgatcgcccagctgcccggcgagaagaagaatggcctgttcggcaacctgattgccctgagcctgggcctgacccccaacttcaagagcaacttcgacctggccgaggatgccaaactgcagctgagcaaggacacctacgacgacgacctggacaacctgctggcccagatcggcgaccagtacgccgacctgtttctggccgccaagaacctgtccgacgccatcctgctgagcgacatcctgagagtgaacaccgagatcaccaaggcccccctgagcgcctctatgatcaagagatacgacgagcaccaccaggacctgaccctgctgaaagctctcgtgcggcagcagctgcctgagaagtacaaagagattttcttcgaccagagcaagaacggctacgccggctacatcgatggcggagccagccaggaagagttctacaagttcatcaagcccatcctggaaaagatggacggcaccgaggaactgctcgtgaagctgaacagagaggacctgctgcggaagcagcggaccttcgacaacggcagcatcccccaccagatccacctgggagagctgcacgccattctgcggcggcaggaagatttttacccattcctgaaggacaaccgggaaaagatcgagaagatcctgaccttccgcatcccctactacgtgggccctctggccaggggaaacagcagattcgcctggatgaccagaaagagcgaggaaaccatcaccccctggaacttcgaggaagtggtggacaagggcgccagcgcccagagcttcatcgagcggatgaccaacttcgataagaacctgcccaacgagaaggtgctgcccaagcacagcctgctgtacgagtacttcaccgtgtacaacgagctgaccaaagtgaaatacgtgaccgagggaatgagaaagcccgccttcctgagcggcgagcagaaaaaagccatcgtggacctgctgttcaagaccaaccggaaagtgaccgtgaagcagctgaaagaggactacttcaagaaaatcgagtgcttcgactccgtggaaatctccggcgtggaagatcggttcaacgcctccctgggcacataccacgatctgctgaaaattatcaaggacaaggacttcctggacaatgaggaaaacgaggacattctggaagatatcgtgctgaccctgacactgtttgaggacagagagatgatcgaggaacggctgaaaacctatgcccacctgttcgacgacaaagtgatgaagcagctgaagcggcggagatacaccggctggggcaggctgagccggaagctgatcaacggcatccgggacaagcagtccggcaagacaatcctggatttcctgaagtccgacggcttcgccaacagaaacttcatgcagctgatccacgacgacagcctgacctttaaagaggacatccagaaagcccaggtgtccggccagggcgatagcctgcacgagcacattgccaatctggccggcagccccgccattaagaagggcatcctgcagacagtgaaggtggtggacgagctcgtgaaagtgatgggccggcacaagcccgagaacatcgtgatcgaaatggccagagagaaccagaccacccagaagggacagaagaacagccgcgagagaatgaagcggatcgaagagggcatcaaagagctgggcagccagatcctgaaagaacaccccgtggaaaacacccagctgcagaacgagaagctgtacctgtactacctgcagaatgggcgggatatgtacgtggaccaggaactggacatcaaccggctgtccgactacgatgtggacgctatcgtgcctcagagctttctgaaggacgactccatcgataacaaagtgctgactcggagcgacaagaaccggggcaagagcgacaacgtgccctccgaagaggtcgtgaagaagatgaagaactactggcgccagctgctgaatgccaagctgattacccagaggaagttcgacaatctgaccaaggccgagagaggcggcctgagcgaactggataaggccggcttcatcaagagacagctggtggaaacccggcagatcacaaagcacgtggcacagatcctggactcccggatgaacactaagtacgacgagaacgacaaactgatccgggaagtgaaagtgatcaccctgaagtccaagctggtgtccgatttccggaaggatttccagttttacaaagtgcgcgagatcaacaactaccaccacgcccacgacgcctacctgaacgccgtcgtgggaaccgccctgatcaaaaagtaccctaagctggaaagcgagttcgtgtacggcgactacaaggtgtacgacgtgcggaagatgatcgccaagagcgagcaggaaatcggcaaggctaccgccaagtacttcttctacagcaacatcatgaactttttcaagaccgagattaccctggccaacggcgagatccggaagcggcctctgatcgagacaaacggcgaaacaggcgagatcgtgtgggataagggccgggactttgccaccgtgcggaaagtgctgtctatgccccaagtgaatatcgtgaaaaagaccgaggtgcagacaggcggcttcagcaaagagtctatcctgcccaagaggaacagcgacaagctgatcgccagaaagaaggactgggaccctaagaagtacggcggcttcgacagccccaccgtggcctattctgtgctggtggtggccaaagtggaaaagggcaagtccaagaaactgaagagtgtgaaagagctgctggggatcaccatcatggaaagaagcagcttcgagaagaatcccatcgactttctggaagccaagggctacaaagaagtgaaaaaggacctgatcatcaagctgcctaagtactccctgttcgagctggaaaacggccggaagagaatgctggcctctgccggcgaactgcagaagggaaacgaactggccctgccctccaaatatgtgaacttcctgtacctggccagccactatgagaagctgaagggctcccccgaggataatgagcagaaacagctgtttgtggaacagcacaaacactacctggacgagatcatcgagcagatcagcgagttctccaagagagtgatcctggccgacgctaatctggacaaggtgctgagcgcctacaacaagcacagagacaagcctatcagagagcaggccgagaatatcatccacctgtttaccctgaccaatctgggagcccctgccgccttcaagtactttgacaccaccatcgaccggaagaggtacaccagcaccaaagaggtgctggacgccaccctgatccaccagagcatcaccggcctgtacgagacacggatcgacctgtctcagctgggaggcgacagcggaagtgagaccccaggtacatccgaatcagcaacgcctgaaagcaccggtatgaacaattcacaggggagagtgacattcgaagacgtgaccgtgaacttcacccagggagaatggcagcgcttgaacccagaacaaaggaacctctatcgggacgtgatgctggaaaactactcaaatttggtgagcgttgggcagggtgagaccactaagcctgacgtgatcctgagattggaacagggcaaggagccttggctcgaggaagaggaagtcctgggctcagggagggccgagaaaaacggtgatataggaggccagatatggaagcctaaggacgtcaaggagagcctgagcgctgattacaaagatgatgacgataaagccccaaaaaagaagagaaaggtaccgaagaaaaaaagaaaggtc

SEQ ID NO: 1752 - protein, 2129 aa, synthetic construct
MPKKKRKVPKKKRKVNHDQEFDPPKVYPPVPAEKRKPIRVLSLFDGIATGLLVLKDLGIQVDRYIASEVCEDSITVGMVRHQGKIMYVGDVRSVTQKHIQEWGPFDLVIGGSPCNDLSIVNPARKGLYEGTGRLFFEFYRLLHDARPKEGDDRPFFWLFENVVAMGVSDKRDISRFLESNPVMIDAKEVSAAHRARYFWGNLPGMNRPLASTVNDKLELQECLEHGRIAKFSKVRTITTRSNSIKQGKDQHFPVFMNEKEDILWCTEMERVFGFPVHYTDVSNMSRLARQRLLGRSWSVPVIRHLFAPLKEYFACVSSGNSNANSRGPSFSSGLVPLSLRGSHMGPMEIYKTVSAWKRQPVRVLSLFRNIDKVLKSLGFLESGSGSGGGTLKYVEDVTNVVRRDVEKWGPFDLVYGSTQPLGSSCDRCPGWYMFQFHRILQYALPRQESQRPFFWIFMDNLLLTEDDQETTTRFLQTEAVTLQDVRGRDYQNAMRVWSNIPGLKSKHAPLTPKEEEYLQAQVRSRSKLDAPKVDLLVKNCLLPLREYFKYFSQNSLPLGGPSSGAPPPSGGSPAGSPTSTEEGTSESATPESGPGTSTEPSEGSAPGSPAGSPTSTEEGTSTEPSEGSAPGTSTEPSEMDKKYSIGLAIGTNSVGWAVITDEYKVPSKKFKVLGNTDRHSIKKNLIGALLFDSGETAEATRLKRTARRRYTRRKNRICYLQEIFSNEMAKVDDSFFHRLEESFLVEEDKKHERHPIFGNIVDEVAYHEKYPTIYHLRKKLVDSTDKADLRLIYLALAHMIKFRGHFLIEGDLNPDNSDVDKLFIQLVQTYNQLFEENPINASGVDAKAILSARLSKSRRLENLIAQLPGEKKNGLFGNLIALSLGLTPNFKSNFDLAEDAKLQLSKDTYDDDLDNLLAQIGDQYADLFLAAKNLSDAILLSDILRVNTEITKAPLSASMIKRYDEHHQDLTLLKALVRQQLPEKYKEIFFDQSKNGYAGYIDGGASQEEFYKFIKPILEKMDGTEELLVKLNREDLLRKQRTFDNGSIPHQIHLGELHAILRRQEDFYPFLKDNREKIEKILTFRIPYYVGPLARGNSRFAWMTRKSEETITPWNFEEVVDKGASAQSFIERMTNFDKNLPNEKVLPKHSLLYEYFTVYNELTKVKYVTEGMRKPAFLSGEQKKAIVDLLFKTNRKVTVKQLKEDYFKKIECFDSVEISGVEDRFNASLGTYHDLLKIIKDKDFLDNEENEDILEDIVLTLTLFEDREMIEERLKTYAHLFDDKVMKQLKRRRYTGWGRLSRKLINGIRDKQSGKTILDFLKSDGFANRNFMQLIHDDSLTFKEDIQKAQVSGQGDSLHEHIANLAGSPAIKKGILQTVKVVDELVKVMGRHKPENIVIEMARENQTTQKGQKNSRERMKRIEEGIKELGSQILKEHPVENTQLQNEKLYLYYLQNGRDMYVDQELDINRLSDYDVDAIVPQSFLKDDSIDNKVLTRSDKNRGKSDNVPSEEVVKKMKNYWRQLLNAKLITQRKFDNLTKAERGGLSELDKAGFIKRQLVETRQITKHVAQILDSRMNTKYDENDKLIREVKVITLKSKLVSDFRKDFQFYKVREINNYHHAHDAYLNAVVGTALIKKYPKLESEFVYGDYKVYDVRKMIAKSEQEIGKATAKYFFYSNIMNFFKTEITLANGEIRKRPLIETNGETGEIVWDKGRDFATVRKVLSMPQVNIVKKTEVQTGGFSKESILPKRNSDKLIARKKDWDPKKYGGFDSPTVAYSVLVVAKVEKGKSKKLKSVKELLGITIMERSSFEKNPIDFLEAKGYKEVKKDLIIKLPKYSLFELENGRKRMLASAGELQKGNELALPSKYVNFLYLASHYEKLKGSPEDNEQKQLFVEQHKHYLDEIIEQISEFSKRVILADANLDKVLSAYNKHRDKPIREQAENIIHLFTLTNLGAPAAFKYFDTTIDRKRYTSTKEVLDATLIHQSITGLYETRIDLSQLGGDSGSETPGTSESATPESTGNKKLEAVGTGIEPKAMSQGLVTFGDVAVDFSQEEWEWLNPIQRNLYRKVMLENYRNLASLGLCVSKPDVISSLEQGKEPWSADYKDDDDKAPKKKRKVPKKKRKV

SEQ ID NO: 1753 - DNA, 6390 bp, synthetic construct
  source 1..6390: mol_type = other DNA
atgccaaaaaagaagagaaaggtaccgaagaaaaaaagaaaggtatacaaccatgaccaggaattcgaccccccaaaggtttacccacctgtgccagctgagaagaggaagcccatccgcgtgctgtctctctttgatgggattgctacagggctcctggtgctgaaggacctgggcatccaagtggaccgctacattgcctccgaggtgtgtgaggactccatcacggtgggcatggtgcggcaccagggaaagatcatgtacgtcggggacgtccgcagcgtcacacagaagcatatccaggagtggggcccattcgacctggtgattggaggcagtccctgcaatgacctctccattgtcaaccctgcccgcaagggactttatgagggtactggccgcctcttctttgagttctaccgcctcctgcatgatgcgcggcccaaggagggagatgatcgccccttcttctggctctttgagaatgtggtggccatgggcgttagtgacaagagggacatctcgcgatttcttgagtctaaccccgtgatgattgacgccaaagaagtgtctgctgcacacagggcccgttacttctggggtaaccttcctggcatgaacaggcctttggcatccactgtgaatgataagctggagctgcaagagtgtctggagcacggcagaatagccaagttcagcaaagtgaggaccattaccaccaggtcaaactctataaagcagggcaaagaccagcatttccccgtcttcatgaacgagaaggaggacatcctgtggtgcactgaaatggaaagggtgtttggcttccccgtccactacacagacgtctccaacatgagccgcttggcgaggcagagactgctgggccgatcgtggagcgtgccggtcatccgccacctcttcgctccgctgaaggaatattttgcttgtgtgtctagcggcaatagtaacgctaacagccgcgggccgagcttcagcagcggcctggtgccgttaagcttgcgcggcagccatatgggccctatggagatatacaagacagtgtctgcatggaagagacagccagtgcgggtactgagcctcttcagaaacatcgacaaggtactaaagagtttgggcttcttggaaagcggttctggttctgggggaggaacgctgaagtacgtggaagatgtcacaaatgtcgtgaggagagacgtggagaaatggggcccctttgacctggtgtacggctcgacgcagcccctaggcagctcttgtgatcgctgtcccggctggtacatgttccagttccaccggatcctgcagtatgcgctgcctcgccaggagagtcagcggcccttcttctggatattcatggacaatctgctgctgactgaggatgaccaagagacaactacccgcttccttcagacagaggctgtgaccctccaggatgtccgtggcagagactaccagaatgctatgcgggtgtggagcaacattccagggctgaagagcaagcatgcgcccctgaccccaaaggaagaagagtatctgcaagcccaagtcagaagcaggagcaagctggacgccccgaaagttgacctcctggtgaagaactgccttctcccgctgagagagtacttcaagtatttttctcaaaactcacttcctcttggagggccgagctctggcgcacccccaccaagtggagggtctcctgccgggtccccaacatctactgaagaaggcaccagcgaatccgcaacgcccgagtcaggccctggtacctccacagaaccatctgaaggtagtgcgcctggttccccagctggaagccctacttccaccgaagaaggcacgtcaaccgaaccaagtgaaggatctgcccctgggaccagcactgaaccatctgagatggacaagaagtacagcatcggcctggccatcggcaccaactctgtgggctgggccgtgatcaccgacgagtacaaggtgcccagcaagaaattcaaggtgctgggcaacaccgaccggcacagcatcaagaagaacctgatcggcgccctgctgttcgacagcggagaaacagccgaggccacccggctgaagagaaccgccagaagaagatacaccagacggaagaaccggatctgctatctgcaagagatcttcagcaacgagatggccaaggtggacgacagcttcttccacagactggaagagtccttcctggtggaagaggataagaagcacgagcggcaccccatcttcggcaacatcgtggacgaggtggcctaccacgagaagtaccccaccatctaccacctgagaaagaaactggtggacagcaccgacaaggccgacctgcggctgatctatctggccctggcccacatgatcaagttccggggccacttcctgatcgagggcgacctgaaccccgacaacagcgacgtggacaagctgttcatccagctggtgcagacctacaaccagctgttcgaggaaaaccccatcaacgccagcggcgtggacgccaaggccatcctgtctgccagactgagcaagagcagacggctggaaaatctgatcgcccagctgcccggcgagaagaagaatggcctgttcggcaacctgattgccctgagcctgggcctgacccccaacttcaagagcaacttcgacctggccgaggatgccaaactgcagctgagcaaggacacctacgacgacgacctggacaacctgctggcccagatcggcgaccagtacgccgacctgtttctggccgccaagaacctgtccgacgccatcctgctgagcgacatcctgagagtgaacaccgagatcaccaaggcccccctgagcgcctctatgatcaagagatacgacgagcaccaccaggacctgaccctgctgaaagctctcgtgcggcagcagctgcctgagaagtacaaagagattttcttcgaccagagcaagaacggctacgccggctacatcgatggcggagccagccaggaagagttctacaagttcatcaagcccatcctggaaaagatggacggcaccgaggaactgctcgtgaagctgaacagagaggacctgctgcggaagcagcggaccttcgacaacggcagcatcccccaccagatccacctgggagagctgcacgccattctgcggcggcaggaagatttttacccattcctgaaggacaaccgggaaaagatcgagaagatcctgaccttccgcatcccctactacgtgggccctctggccaggggaaacagcagattcgcctggatgaccagaaagagcgaggaaaccatcaccccctggaacttcgaggaagtggtggacaagggcgccagcgcccagagcttcatcgagcggatgaccaacttcgataagaacctgcccaacgagaaggtgctgcccaagcacagcctgctgtacgagtacttcaccgtgtacaacgagctgaccaaagtgaaatacgtgaccgagggaatgagaaagcccgccttcctgagcggcgagcagaaaaaagccatcgtggacctgctgttcaagaccaaccggaaagtgaccgtgaagcagctgaaagaggactacttcaagaaaatcgagtgcttcgactccgtggaaatctccggcgtggaagatcggttcaacgcctccctgggcacataccacgatctgctgaaaattatcaaggacaaggacttcctggacaatgaggaaaacgaggacattctggaagatatcgtgctgaccctgacactgtttgaggacagagagatgatcgaggaacggctgaaaacctatgcccacctgttcgacgacaaagtgatgaagcagctgaagcggcggagatacaccggctggggcaggctgagccggaagctgatcaacggcatccgggacaagcagtccggcaagacaatcctggatttcctgaagtccgacggcttcgccaacagaaacttcatgcagctgatccacgacgacagcctgacctttaaagaggacatccagaaagcccaggtgtccggccagggcgatagcctgcacgagcacattgccaatctggccggcagccccgccattaagaagggcatcctgcagacagtgaaggtggtggacgagctcgtgaaagtgatgggccggcacaagcccgagaacatcgtgatcgaaatggccagagagaaccagaccacccagaagggacagaagaacagccgcgagagaatgaagcggatcgaagagggcatcaaagagctgggcagccagatcctgaaagaacaccccgtggaaaacacccagctgcagaacgagaagctgtacctgtactacctgcagaatgggcgggatatgtacgtggaccaggaactggacatcaaccggctgtccgactacgatgtggacgctatcgtgcctcagagctttctgaaggacgactccatcgataacaaagtgctgactcggagcgacaagaaccggggcaagagcgacaacgtgccctccgaagaggtcgtgaagaagatgaagaactactggcgccagctgctgaatgccaagctgattacccagaggaagttcgacaatctgaccaaggccgagagaggcggcctgagcgaactggataaggccggcttcatcaagagacagctggtggaaacccggcagatcacaaagcacgtggcacagatcctggactcccggatgaacactaagtacgacgagaacgacaaactgatccgggaagtgaaagtgatcaccctgaagtccaagctggtgtccgatttccggaaggatttccagttttacaaagtgcgcgagatcaacaactaccaccacgcccacgacgcctacctgaacgccgtcgtgggaaccgccctgatcaaaaagtaccctaagctggaaagcgagttcgtgtacggcgactacaaggtgtacgacgtgcggaagatgatcgccaagagcgagcaggaaatcggcaaggctaccgccaagtacttcttctacagcaacatcatgaactttttcaagaccgagattaccctggccaacggcgagatccggaagcggcctctgatcgagacaaacggcgaaacaggcgagatcgtgtgggataagggccgggactttgccaccgtgcggaaagtgctgtctatgccccaagtgaatatcgtgaaaaagaccgaggtgcagacaggcggcttcagcaaagagtctatcctgcccaagaggaacagcgacaagctgatcgccagaaagaaggactgggaccctaagaagtacggcggcttcgacagccccaccgtggcctattctgtgctggtggtggccaaagtggaaaagggcaagtccaagaaactgaagagtgtgaaagagctgctggggatcaccatcatggaaagaagcagcttcgagaagaatcccatcgactttctggaagccaagggctacaaagaagtgaaaaaggacctgatcatcaagctgcctaagtactccctgttcgagctggaaaacggccggaagagaatgctggcctctgccggcgaactgcagaagggaaacgaactggccctgccctccaaatatgtgaacttcctgtacctggccagccactatgagaagctgaagggctcccccgaggataatgagcagaaacagctgtttgtggaacagcacaaacactacctggacgagatcatcgagcagatcagcgagttctccaagagagtgatcctggccgacgctaatctggacaaggtgctgagcgcctacaacaagcacagagacaagcctatcagagagcaggccgagaatatcatccacctgtttaccctgaccaatctgggagcccctgccgccttcaagtactttgacaccaccatcgaccggaagaggtacaccagcaccaaagaggtgctggacgccaccctgatccaccagagcatcaccggcctgtacgagacacggatcgacctgtctcagctgggaggcgacagcggaagtgagaccccaggtacatccgaatcagcaacgcctgaaagcaccggtaacaaaaagcttgaggccgtcggaaccggaatcgaaccaaaagcaatgtcccagggtttggtgacatttggcgacgtggctgtcgatttttcccaggaagagtgggagtggctcaatcctatccagaggaacttgtaccggaaggtgatgctggagaattatagaaatttggcatcactggggttgtgcgttagcaaaccagatgttatatcttccctggaacagggaaaggagccctggagcgctgattacaaagatgatgacgataaagccccaaaaaagaagagaaaggtaccgaagaaaaaaagaaaggtc

SEQ ID NO: 1754 - protein, 2295 aa, synthetic construct
MPKKKRKVPKKKRKVYNHDQEFDPPKVYPPVPAEKRKPIRVLSLFDGIATGLLVLKDLGIQVDRYIASEVCEDSITVGMVRHQGKIMYVGDVRSVTQKHIQEWGPFDLVIGGSPCNDLSIVNPARKGLYEGTGRLFFEFYRLLHDARPKEGDDRPFFWLFENVVAMGVSDKRDISRFLESNPVMIDAKEVSAAHRARYFWGNLPGMNRPLASTVNDKLELQECLEHGRIAKFSKVRTITTRSNSIKQGKDQHFPVFMNEKEDILWCTEMERVFGFPVHYTDVSNMSRLARQRLLGRSWSVPVIRHLFAPLKEYFACVSSGNSNANSRGPSFSSGLVPLSLRGSHMAAIPALDPEAEPSMDVILVGSSELSSSVSPGTGRDLIAYEVKANQRNIEDICICCGSLQVHTQHPLFEGGICAPCKDKFLDALFLYDDDGYQSYCSICCSGETLLICGNPDCTRCYCFECVDSLVGPGTSGKVHAMSNWVCYLCLPSSRSGLLQRRRKWRSQLKAFYDRESENPLEMFETVPVWRRQPVRVLSLFEDIKKELTSLGFLESGSDPGQLKHVVDVTDTVRKDVEEWGPFDLVYGATPPLGHTCDRPPSWYLFQFHRLLQYARPKPGSPRPFFWMFVDNLVLNKEDLDVASRFLEMEPVTIPDVHGGSLQNAVRVWSNIPAIRSRHWALVSEEELSLLAQNKQSSKLAAKWPTKLVKNCFLPLREYFKYFSTELTSSPGGPSSGAPPPSGGSPAGSPTSTEEGTSESATPESGPGTSTEPSEGSAPGSPAGSPTSTEEGTSTEPSEGSAPGTSTEPSELEDKKYSIGLAIGTNSVGWAVITDEYKVPSKKFKVLGNTDRHSIKKNLIGALLFDSGETAEATRLKRTARRRYTRRKNRICYLQEIFSNEMAKVDDSFFHRLEESFLVEEDKKHERHPIFGNIVDEVAYHEKYPTIYHLRKKLVDSTDKADLRLIYLALAHMIKFRGHFLIEGDLNPDNSDVDKLFIQLVQTYNQLFEENPINASGVDAKAILSARLSKSRRLENLIAQLPGEKKNGLFGNLIALSLGLTPNFKSNFDLAEDAKLQLSKDTYDDDLDNLLAQIGDQYADLFLAAKNLSDAILLSDILRVNTEITKAPLSASMIKRYDEHHQDLTLLKALVRQQLPEKYKEIFFDQSKNGYAGYIDGGASQEEFYKFIKPILEKMDGTEELLVKLNREDLLRKQRTFDNGSIPHQIHLGELHAILRRQEDFYPFLKDNREKIEKILTFRIPYYVGPLARGNSRFAWMTRKSEETITPWNFEEVVDKGASAQSFIERMTNFDKNLPNEKVLPKHSLLYEYFTVYNELTKVKYVTEGMRKPAFLSGEQKKAIVDLLFKTNRKVTVKQLKEDYFKKIECFDSVEISGVEDRFNASLGTYHDLLKIIKDKDFLDNEENEDILEDIVLTLTLFEDREMIEERLKTYAHLFDDKVMKQLKRRRYTGWGRLSRKLINGIRDKQSGKTILDFLKSDGFANRNFMQLIHDDSLTFKEDIQKAQVSGQGDSLHEHIANLAGSPAIKKGILQTVKVVDELVKVMGRHKPENIVIEMARENQTTQKGQKNSRERMKRIEEGIKELGSQILKEHPVENTQLQNEKLYLYYLQNGRDMYVDQELDINRLSDYDVDAIVPQSFLKDDSIDNKVLTRSDKNRGKSDNVPSEEVVKKMKNYWRQLLNAKLITQRKFDNLTKAERGGLSELDKAGFIKRQLVETRQITKHVAQILDSRMNTKYDENDKLIREVKVITLKSKLVSDFRKDFQFYKVREINNYHHAHDAYLNAVVGTALIKKYPKLESEFVYGDYKVYDVRKMIAKSEQEIGKATAKYFFYSNIMNFFKTEITLANGEIRKRPLIETNGETGEIVWDKGRDFATVRKVLSMPQVNIVKKTEVQTGGFSKESILPKRNSDKLIARKKDWDPKKYGGFDSPTVAYSVLVVAKVEKGKSKKLKSVKELLGITIMERSSFEKNPIDFLEAKGYKEVKKDLIIKLPKYSLFELENGRKRMLASAGELQKGNELALPSKYVNFLYLASHYEKLKGSPEDNEQKQLFVEQHKHYLDEIIEQISEFSKRVILADANLDKVLSAYNKHRDKPIREQAENIIHLFTLTNLGAPAAFKYFDTTIDRKRYTSTKEVLDATLIHQSITGLYETRIDLSQLGGDSPKKKRKVGVDGSSGSETPGTSESATPESRTLVTFKDVFVDFTREEWKLLDTAQQIVYRNVMLENYKNLVSLGYQLTKPDVILRLEKGEEPSADYKDDDDKAPKKKRKVPKKKRKV

SEQ ID NO: 1755 - DNA, 6897 bp, synthetic construct
  source 1..6897: mol_type = other DNA
atgggtaccatgccaaaaaagaagagaaaggtaccgaagaaaaaaagaaaggtatacaatcacgatcaggagttcgacccccctaaggtgtacccaccagtgcctgcagagaagaggaagccaatccgggtgctgagcctgtttgatggcatcgccaccggcctgctggtgctgaaggatctgggcatccaggtggaccggtacatcgcctccgaggtgtgcgaggattctatcaccgtgggcatggtgcgccaccagggcaagatcatgtatgtgggcgacgtgcggtccgtgacacagaagcacatccaggagtggggcccattcgatctggtgatcggcggcagcccctgtaatgacctgtccatcgtgaaccctgcaaggaagggactgtacgagggaaccggccggctgttctttgagttttatagactgctgcacgacgccaggcctaaggagggcgacgatagaccattcttttggctgttcgagaatgtggtggctatgggcgtgagcgataagagggacatctccaggtttctggagtctaaccccgtgatgatcgatgcaaaggaggtgtccgccgcacacagagccaggtatttctggggcaatctgccaggaatgaacaggccactggcaagcaccgtgaatgacaagctggagctgcaggagtgcctggagcacggaaggatcgccaagttttccaaggtgcgcacaatcaccacacggagcaattccatcaagcagggcaaggatcagcacttccccgtgttcatgaacgagaaggaggacatcctgtggtgtaccgagatggagagagtgttcggctttccagtgcactacacagacgtgtctaacatgagcaggctggcaaggcagcggctgctgggcagatcttggagcgtgcccgtgatcaggcacctgttcgcccctctgaaggagtattttgcctgcgtgagcagcggcaactccaatgccaacagccggggcccctctttcagctccggattggtgcctctgagcctgaggggctcccacatggcagcaatccccgccctggaccccgaggccgagcctagcatggacgtgatcctggtgggctctagcgagctgtcctctagcgtgtctccaggaaccggaagggatctgatcgcatacgaggtgaaggccaatcagcggaacatcgaggacatctgtatctgctgtggcagcctgcaggtgcacacacagcacccactgttcgagggaggaatctgcgcaccctgtaaggataagttcctggacgccctgtttctgtacgacgatgacggctaccagtcctattgctctatctgctgttccggcgagaccctgctgatctgcggcaatccagattgtacaaggtgctattgttttgagtgcgtggactctctggtgggaccaggcaccagcggaaaggtgcacgccatgtccaactgggtgtgctacctgtgcctgccatcctctcgcagcggactgctgcagcggagaaggaagtggagatcccagctgaaggccttctatgatagggagtctgagaaccccctggagatgtttgagaccgtgccagtgtggcgccggcagcccgtgagggtgctgagcctgttcgaggatatcaagaaggagctgacatccctgggctttctggagtccggctctgaccccggacagctgaagcacgtggtggatgtgaccgacacagtgcggaaggatgtggaggagtggggccctttcgacctggtgtacggagcaacccctccactgggacacacatgcgacagacccccttcttggtacctgttccagtttcaccgcctgctgcagtatgcaaggccaaagccaggcagccctagaccattcttttggatgttcgtggataatctggtgctgaacaaggaggatctggacgtggccagcaggtttctggagatggagccagtgaccatcccagacgtgcacggcggctccctgcagaatgccgtgcgcgtgtggtctaacatccctgccatcagaagcaggcactgggcactggtgagcgaggaggagctgtccctgctggcccagaataagcagagcagcaagctggccgccaagtggcctacaaagctggtgaagaactgcttcctgccactgcgggagtacttcaagtatttttccaccgagctgacatctagcctgggaggaccctcctctggcgccccaccacctagcggcggctcccctgccggctctccaaccagcacagaggagggcaccagcgagtccgccacaccagagtctggacctggcaccagcacagagccatccgagggctctgccccaggctctcctgcaggcagccctacctccaccgaagagggcaccagcacagagccttctgagggcagcgccccaggcacctctacagagccaagcgagctcgaggacaagaagtacagcatcggcctggccatcggcaccaactctgtgggctgggccgtgatcaccgacgagtacaaggtgcccagcaagaaattcaaggtgctgggcaacaccgaccggcacagcatcaagaagaacctgatcggagccctgctgttcgacagcggcgaaacagccgaggccacccggctgaagagaaccgccagaagaagatacaccagacggaagaaccggatctgctatctgcaagagatcttcagcaacgagatggccaaggtggacgacagcttcttccacagactggaagagtccttcctggtggaagaggataagaagcacgagcggcaccccatcttcggcaacatcgtggacgaggtggcctaccacgagaagtaccccaccatctaccacctgagaaagaaactggtggacagcaccgacaaggccgacctgcggctgatctatctggccctggcccacatgatcaagttccggggccacttcctgatcgagggcgacctgaaccccgacaacagcgacgtggacaagctgttcatccagctggtgcagacctacaaccagctgttcgaggaaaaccccatcaacgccagcggcgtggacgccaaggccatcctgtctgccagactgagcaagagcagacggctggaaaatctgatcgcccagctgcccggcgagaagaagaatggcctgttcggcaacctgattgccctgagcctgggcctgacccccaacttcaagagcaacttcgacctggccgaggatgccaaactgcagctgagcaaggacacctacgacgacgacctggacaacctgctggcccagatcggcgaccagtacgccgacctgtttctggccgccaagaacctgtccgacgccatcctgctgagcgacatcctgagagtgaacaccgagatcaccaaggcccccctgagcgcctctatgatcaagagatacgacgagcaccaccaggacctgaccctgctgaaagctctcgtgcggcagcagctgcctgagaagtacaaagagattttcttcgaccagagcaagaacggctacgccggctacattgacggcggagccagccaggaagagttctacaagttcatcaagcccatcctggaaaagatggacggcaccgaggaactgctcgtgaagctgaacagagaggacctgctgcggaagcagcggaccttcgacaacggcagcatcccccaccagatccacctgggagagctgcacgccattctgcggcggcaggaagatttttacccattcctgaaggacaaccgggaaaagatcgagaagatcctgaccttccgcatcccctactacgtgggccctctggccaggggaaacagcagattcgcctggatgaccagaaagagcgaggaaaccatcaccccctggaacttcgaggaagtggtggacaagggcgcttccgcccagagcttcatcgagcggatgaccaacttcgataagaacctgcccaacgagaaggtgctgcccaagcacagcctgctgtacgagtacttcaccgtgtataacgagctgaccaaagtgaaatacgtgaccgagggaatgagaaagcccgccttcctgagcggcgagcagaaaaaggccatcgtggacctgctgttcaagaccaaccggaaagtgaccgtgaagcagctgaaagaggactacttcaagaaaatcgagtgcttcgactccgtggaaatctccggcgtggaagatcggttcaacgcctccctgggcacataccacgatctgctgaaaattatcaaggacaaggacttcctggacaatgaggaaaacgaggacattctggaagatatcgtgctgaccctgacactgtttgaggacagagagatgatcgaggaacggctgaaaacctatgcccacctgttcgacgacaaagtgatgaagcagctgaagcggcggagatacaccggctggggcaggctgagccggaagctgatcaacggcatccgggacaagcagtccggcaagacaatcctggatttcctgaagtccgacggcttcgccaacagaaacttcatgcagctgatccacgacgacagcctgacctttaaagaggacatccagaaagcccaggtgtccggccagggcgatagcctgcacgagcacattgccaatctggccggcagccccgccattaagaagggcatcctgcagacagtgaaggtggtggacgagctcgtgaaagtgatgggccggcacaagcccgagaacatcgtgatcgaaatggccagagagaaccagaccacccagaagggacagaagaacagccgcgagagaatgaagcggatcgaagagggcatcaaagagctgggcagccagatcctgaaagaacaccccgtggaaaacacccagctgcagaacgagaagctgtacctgtactacctgcagaatgggcgggatatgtacgtggaccaggaactggacatcaaccggctgtccgactacgatgtggacgccatcgtgcctcagagctttctgaaggacgactccatcgacaacaaggtgctgaccagaagcgacaagaaccggggcaagagcgacaacgtgccctccgaagaggtcgtgaagaagatgaagaactactggcggcagctgctgaacgccaagctgattacccagagaaagttcgacaatctgaccaaggccgagagaggcggcctgagcgaactggataaggccggcttcatcaagagacagctggtggaaacccggcagatcacaaagcacgtggcacagatcctggactcccggatgaacactaagtacgacgagaatgacaagctgatccgggaagtgaaagtgatcaccctgaagtccaagctggtgtccgatttccggaaggatttccagttttacaaagtgcgcgagatcaacaactaccaccacgcccacgacgcctacctgaacgccgtcgtgggaaccgccctgatcaaaaagtaccctaagctggaaagcgagttcgtgtacggcgactacaaggtgtacgacgtgcggaagatgatcgccaagagcgagcaggaaatcggcaaggctaccgccaagtacttcttctacagcaacatcatgaactttttcaagaccgagattaccctggccaacggcgagatccggaagcggcctctgatcgagacaaacggcgaaaccggggagatcgtgtgggataagggccgggattttgccaccgtgcggaaagtgctgagcatgccccaagtgaatatcgtgaaaaagaccgaggtgcagacaggcggcttcagcaaagagtctatcctgcccaagaggaacagcgataagctgatcgccagaaagaaggactgggaccctaagaagtacggcggcttcgacagccccaccgtggcctattctgtgctggtggtggccaaagtggaaaagggcaagtccaagaaactgaagagtgtgaaagagctgctggggatcaccatcatggaaagaagcagcttcgagaagaatcccatcgactttctggaagccaagggctacaaagaagtgaaaaaggacctgatcatcaagctgcctaagtactccctgttcgagctggaaaacggccggaagagaatgctggcctctgccggcgaactgcagaagggaaacgaactggccctgccctccaaatatgtgaacttcctgtacctggccagccactatgagaagctgaagggctcccccgaggataatgagcagaaacagctgtttgtggaacagcacaagcactacctggacgagatcatcgagcagatcagcgagttctccaagagagtgatcctggccgacgctaatctggacaaagtgctgtccgcctacaacaagcaccgggataagcccatcagagagcaggccgagaatatcatccacctgtttaccctgaccaatctgggagcccctgccgccttcaagtactttgacaccaccatcgaccggaagaggtacaccagcaccaaagaggtgctggacgccaccctgatccaccagagcatcaccggcctgtacgagacacggatcgacctgtctcagctgggaggcgacagccccaagaagaagagaaaggtgggagtcgacggatccagcggctccgagaccccaggcacatctgagagcgccacccctgagtcccggaccctggtgaccttcaaggatgtatttgtggacttcaccagggaggagtggaagctgctggacactgctcagcagatcgtgtacagaaatgtgatgctggagaactataagaacctggtttccttgggttatcagcttactaagccagatgtgatcctccggttggagaagggagaagagcccagcgctgattacaaagatgatgacgataaagccccaaaaaagaagagaaaggtaccgaagaaaaaaagaaaggtctga

SEQ ID NO: 1756 - protein, 2318 aa, synthetic construct; identical to SEQ ID NO: 661

SEQ ID NO: 1757 - DNA, 6957 bp, synthetic construct
  source 1..6957: mol_type = other DNA
atgggtaccatgccaaaaaagaagagaaaggtaccgaagaaaaaaagaaaggtatacaatcacgatcaggagttcgacccccctaaggtgtacccaccagtgcctgcagagaagaggaagccaatccgggtgctgagcctgtttgatggcatcgccaccggcctgctggtgctgaaggatctgggcatccaggtggaccggtacatcgcctccgaggtgtgcgaggattctatcaccgtgggcatggtgcgccaccagggcaagatcatgtatgtgggcgacgtgcggtccgtgacacagaagcacatccaggagtggggcccattcgatctggtgatcggcggcagcccctgtaatgacctgtccatcgtgaaccctgcaaggaagggactgtacgagggaaccggccggctgttctttgagttttatagactgctgcacgacgccaggcctaaggagggcgacgatagaccattcttttggctgttcgagaatgtggtggctatgggcgtgagcgataagagggacatctccaggtttctggagtctaaccccgtgatgatcgatgcaaaggaggtgtccgccgcacacagagccaggtatttctggggcaatctgccaggaatgaacaggccactggcaagcaccgtgaatgacaagctggagctgcaggagtgcctggagcacggaaggatcgccaagttttccaaggtgcgcacaatcaccacacggagcaattccatcaagcagggcaaggatcagcacttccccgtgttcatgaacgagaaggaggacatcctgtggtgtaccgagatggagagagtgttcggctttccagtgcactacacagacgtgtctaacatgagcaggctggcaaggcagcggctgctgggcagatcttggagcgtgcccgtgatcaggcacctgttcgcccctctgaaggagtattttgcctgcgtgagcagcggcaactccaatgccaacagccggggcccctctttcagctccggattggtgcctctgagcctgaggggctcccacatggcagcaatccccgccctggaccccgaggccgagcctagcatggacgtgatcctggtgggctctagcgagctgtcctctagcgtgtctccaggaaccggaagggatctgatcgcatacgaggtgaaggccaatcagcggaacatcgaggacatctgtatctgctgtggcagcctgcaggtgcacacacagcacccactgttcgagggaggaatctgcgcaccctgtaaggataagttcctggacgccctgtttctgtacgacgatgacggctaccagtcctattgctctatctgctgttccggcgagaccctgctgatctgcggcaatccagattgtacaaggtgctattgttttgagtgcgtggactctctggtgggaccaggcaccagcggaaaggtgcacgccatgtccaactgggtgtgctacctgtgcctgccatcctctcgcagcggactgctgcagcggagaaggaagtggagatcccagctgaaggccttctatgatagggagtctgagaaccccctggagatgtttgagaccgtgccagtgtggcgccggcagcccgtgagggtgctgagcctgttcgaggatatcaagaaggagctgacatccctgggctttctggagtccggctctgaccccggacagctgaagcacgtggtggatgtgaccgacacagtgcggaaggatgtggaggagtggggccctttcgacctggtgtacggagcaacccctccactgggacacacatgcgacagacccccttcttggtacctgttccagtttcaccgcctgctgcagtatgcaaggccaaagccaggcagccctagaccattcttttggatgttcgtggataatctggtgctgaacaaggaggatctggacgtggccagcaggtttctggagatggagccagtgaccatcccagacgtgcacggcggctccctgcagaatgccgtgcgcgtgtggtctaacatccctgccatcagaagcaggcactgggcactggtgagcgaggaggagctgtccctgctggcccagaataagcagagcagcaagctggccgccaagtggcctacaaagctggtgaagaactgcttcctgccactgcgggagtacttcaagtatttttccaccgagctgacatctagcctgggaggaccctcctctggcgccccaccacctagcggcggctcccctgccggctctccaaccagcacagaggagggcaccagcgagtccgccacaccagagtctggacctggcaccagcacagagccatccgagggctctgccccgggctctcctgcaggcagccctacctccaccgaagagggcaccagcacagagccttctgagggcagcgccccaggcacctctacagagccaagcgagctcgaggacaagaagtacagcatcggcctggccatcggcaccaactctgtgggctgggccgtgatcaccgacgagtacaaggtgcccagcaagaaattcaaggtgctgggcaacaccgaccggcacagcatcaagaagaacctgatcggagccctgctgttcgacagcggcgaaacagccgaggccacccggctgaagagaaccgccagaagaagatacaccagacggaagaaccggatctgctatctgcaagagatcttcagcaacgagatggccaaggtggacgacagcttcttccacagactggaagagtccttcctggtggaagaggataagaagcacgagcggcaccccatcttcggcaacatcgtggacgaggtggcctaccacgagaagtaccccaccatctaccacctgagaaagaaactggtggacagcaccgacaaggccgacctgcggctgatctatctggccctggcccacatgatcaagttccggggccacttcctgatcgagggcgacctgaaccccgacaacagcgacgtggacaagctgttcatccagctggtgcagacctacaaccagctgttcgaggaaaaccccatcaacgccagcggcgtggacgccaaggccatcctgtctgccagactgagcaagagcagacggctggaaaatctgatcgcccagctgcccggcgagaagaagaatggcctgttcggcaacctgattgccctgagcctgggcctgacccccaacttcaagagcaacttcgacctggccgaggatgccaaactgcagctgagcaaggacacctacgacgacgacctggacaacctgctggcccagatcggcgaccagtacgccgacctgtttctggccgccaagaacctgtccgacgccatcctgctgagcgacatcctgagagtgaacaccgagatcaccaaggcccccctgagcgcctctatgatcaagagatacgacgagcaccaccaggacctgaccctgctgaaagctctcgtgcggcagcagctgcctgagaagtacaaagagattttcttcgaccagagcaagaacggctacgccggctacattgacggcggagccagccaggaagagttctacaagttcatcaagcccatcctggaaaagatggacggcaccgaggaactgctcgtgaagctgaacagagaggacctgctgcggaagcagcggaccttcgacaacggcagcatcccccaccagatccacctgggagagctgcacgccattctgcggcggcaggaagatttttacccattcctgaaggacaaccgggaaaagatcgagaagatcctgaccttccgcatcccctactacgtgggccctctggccaggggaaacagcagattcgcctggatgaccagaaagagcgaggaaaccatcaccccctggaacttcgaggaagtggtggacaagggcgcttccgcccagagcttcatcgagcggatgaccaacttcgataagaacctgcccaacgagaaggtgctgcccaagcacagcctgctgtacgagtacttcaccgtgtataacgagctgaccaaagtgaaatacgtgaccgagggaatgagaaagcccgccttcctgagcggcgagcagaaaaaggccatcgtggacctgctgttcaagaccaaccggaaagtgaccgtgaagcagctgaaagaggactacttcaagaaaatcgagtgcttcgactccgtggaaatctccggcgtggaagatcggttcaacgcctccctgggcacataccacgatctgctgaaaattatcaaggacaaggacttcctggacaatgaggaaaacgaggacattctggaagatatcgtgctgaccctgacactgtttgaggacagagagatgatcgaggaacggctgaaaacctatgcccacctgttcgacgacaaagtgatgaagcagctgaagcggcggagatacaccggctggggcaggctgagccggaagctgatcaacggcatccgggacaagcagtccggcaagacaatcctggatttcctgaagtccgacggcttcgccaacagaaacttcatgcagctgatccacgacgacagcctgacctttaaagaggacatccagaaagcccaggtgtccggccagggcgatagcctgcacgagcacattgccaatctggccggcagccccgccattaagaagggcatcctgcagacagtgaaggtggtggacgagctcgtgaaagtgatgggccggcacaagcccgagaacatcgtgatcgaaatggccagagagaaccagaccacccagaagggacagaagaacagccgcgagagaatgaagcggatcgaagagggcatcaaagagctgggcagccagatcctgaaagaacaccccgtggaaaacacccagctgcagaacgagaagctgtacctgtactacctgcagaatgggcgggatatgtacgtggaccaggaactggacatcaaccggctgtccgactacgatgtggacgccatcgtgcctcagagctttctgaaggacgactccatcgacaacaaggtgctgaccagaagcgacaagaaccggggcaagagcgacaacgtgccctccgaagaggtcgtgaagaagatgaagaactactggcggcagctgctgaacgccaagctgattacccagagaaagttcgacaatctgaccaaggccgagagaggcggcctgagcgaactggataaggccggcttcatcaagagacagctggtggaaacccggcagatcacaaagcacgtggcacagatcctggactcccggatgaacactaagtacgacgagaatgacaagctgatccgggaagtgaaagtgatcaccctgaagtccaagctggtgtccgatttccggaaggatttccagttttacaaagtgcgcgagatcaacaactaccaccacgcccacgacgcctacctgaacgccgtcgtgggaaccgccctgatcaaaaagtaccctaagctggaaagcgagttcgtgtacggcgactacaaggtgtacgacgtgcggaagatgatcgccaagagcgagcaggaaatcggcaaggctaccgccaagtacttcttctacagcaacatcatgaactttttcaagaccgagattaccctggccaacggcgagatccggaagcggcctctgatcgagacaaacggcgaaaccggggagatcgtgtgggataagggccgggattttgccaccgtgcggaaagtgctgagcatgccccaagtgaatatcgtgaaaaagaccgaggtgcagacaggcggcttcagcaaagagtctatcctgcccaagaggaacagcgataagctgatcgccagaaagaaggactgggaccctaagaagtacggcggcttcgacagccccaccgtggcctattctgtgctggtggtggccaaagtggaaaagggcaagtccaagaaactgaagagtgtgaaagagctgctggggatcaccatcatggaaagaagcagcttcgagaagaatcccatcgactttctggaagccaagggctacaaagaagtgaaaaaggacctgatcatcaagctgcctaagtactccctgttcgagctggaaaacggccggaagagaatgctggcctctgccggcgaactgcagaagggaaacgaactggccctgccctccaaatatgtgaacttcctgtacctggccagccactatgagaagctgaagggctcccccgaggataatgagcagaaacagctgtttgtggaacagcacaagcactacctggacgagatcatcgagcagatcagcgagttctccaagagagtgatcctggccgacgctaatctggacaaagtgctgtccgcctacaacaagcaccgggataagcccatcagagagcaggccgagaatatcatccacctgtttaccctgaccaatctgggagcccctgccgccttcaagtactttgacaccaccatcgaccggaagaggtacaccagcaccaaagaggtgctggacgccaccctgatccaccagagcatcaccggcctgtacgagacacggatcgacctgtctcagctgggaggcgacagccccaagaagaagagaaaggtgggagtcgacggatccagcggctccgagaccccaggcacatctgagagcgccacccctgagtccaccggtaacaaaaagcttgaggccgtcggaaccggaatcgaaccaaaagcaatgtcccagggtttggtgacatttggcgacgtggctgtcgatttttcccaggaagagtgggagtggctcaatcctatccagaggaacttgtaccggaaggtgatgctggagaattatagaaatttggcatcactggggttgtgcgttagcaaaccagatgttatatcttccctggaacagggaaaggagccctggagcgctgattacaaagatgatgacgataaagcccccaagaagaaaaggaaggtcccaaagaaaaaaagaaaggtgtga

SEQ ID NO: 1758 - protein, 2338 aa, synthetic construct; identical to SEQ ID NO: 663

SEQ ID NO: 1759 - DNA, 7017 bp, synthetic construct
  source 1..7017: mol_type = other DNA
atgggtaccatgccaaaaaagaagagaaaggtaccgaagaaaaaaagaaaggtatacaatcacgatcaggagttcgacccccctaaggtgtacccaccagtgcctgcagagaagaggaagccaatccgggtgctgagcctgtttgatggcatcgccaccggcctgctggtgctgaaggatctgggcatccaggtggaccggtacatcgcctccgaggtgtgcgaggattctatcaccgtgggcatggtgcgccaccagggcaagatcatgtatgtgggcgacgtgcggtccgtgacacagaagcacatccaggagtggggcccattcgatctggtgatcggcggcagcccctgtaatgacctgtccatcgtgaaccctgcaaggaagggactgtacgagggaaccggccggctgttctttgagttttatagactgctgcacgacgccaggcctaaggagggcgacgatagaccattcttttggctgttcgagaatgtggtggctatgggcgtgagcgataagagggacatctccaggtttctggagtctaaccccgtgatgatcgatgcaaaggaggtgtccgccgcacacagagccaggtatttctggggcaatctgccaggaatgaacaggccactggcaagcaccgtgaatgacaagctggagctgcaggagtgcctggagcacggaaggatcgccaagttttccaaggtgcgcacaatcaccacacggagcaattccatcaagcagggcaaggatcagcacttccccgtgttcatgaacgagaaggaggacatcctgtggtgtaccgagatggagagagtgttcggctttccagtgcactacacagacgtgtctaacatgagcaggctggcaaggcagcggctgctgggcagatcttggagcgtgcccgtgatcaggcacctgttcgcccctctgaaggagtattttgcctgcgtgagcagcggcaactccaatgccaacagccggggcccctctttcagctccggattggtgcctctgagcctgaggggctcccacatggcagcaatccccgccctggaccccgaggccgagcctagcatggacgtgatcctggtgggctctagcgagctgtcctctagcgtgtctccaggaaccggaagggatctgatcgcatacgaggtgaaggccaatcagcggaacatcgaggacatctgtatctgctgtggcagcctgcaggtgcacacacagcacccactgttcgagggaggaatctgcgcaccctgtaaggataagttcctggacgccctgtttctgtacgacgatgacggctaccagtcctattgctctatctgctgttccggcgagaccctgctgatctgcggcaatccagattgtacaaggtgctattgttttgagtgcgtggactctctggtgggaccaggcaccagcggaaaggtgcacgccatgtccaactgggtgtgctacctgtgcctgccatcctctcgcagcggactgctgcagcggagaaggaagtggagatcccagctgaaggccttctatgatagggagtctgagaaccccctggagatgtttgagaccgtgccagtgtggcgccggcagcccgtgagggtgctgagcctgttcgaggatatcaagaaggagctgacatccctgggctttctggagtccggctctgaccccggacagctgaagcacgtggtggatgtgaccgacacagtgcggaaggatgtggaggagtggggccctttcgacctggtgtacggagcaacccctccactgggacacacatgcgacagacccccttcttggtacctgttccagtttcaccgcctgctgcagtatgcaaggccaaagccaggcagccctagaccattcttttggatgttcgtggataatctggtgctgaacaaggaggatctggacgtggccagcaggtttctggagatggagccagtgaccatcccagacgtgcacggcggctccctgcagaatgccgtgcgcgtgtggtctaacatccctgccatcagaagcaggcactgggcactggtgagcgaggaggagctgtccctgctggcccagaataagcagagcagcaagctggccgccaagtggcctacaaagctggtgaagaactgcttcctgccactgcgggagtacttcaagtatttttccaccgagctgacatctagcctgggaggaccctcctctggcgccccaccacctagcggcggctcccctgccggctctccaaccagcacagaggagggcaccagcgagtccgccacaccagagtctggacctggcaccagcacagagccatccgagggctctgccccaggctctcctgcaggcagccctacctccaccgaagagggcaccagcacagagccttctgagggcagcgccccaggcacctctacagagccaagcgagctcgaggacaagaagtacagcatcggcctggccatcggcaccaactctgtgggctgggccgtgatcaccgacgagtacaaggtgcccagcaagaaattcaaggtgctgggcaacaccgaccggcacagcatcaagaagaacctgatcggagccctgctgttcgacagcggcgaaacagccgaggccacccggctgaagagaaccgccagaagaagatacaccagacggaagaaccggatctgctatctgcaagagatcttcagcaacgagatggccaaggtggacgacagcttcttccacagactggaagagtccttcctggtggaagaggataagaagcacgagcggcaccccatcttcggcaacatcgtggacgaggtggcctaccacgagaagtaccccaccatctaccacctgagaaagaaactggtggacagcaccgacaaggccgacctgcggctgatctatctggccctggcccacatgatcaagttccggggccacttcctgatcgagggcgacctgaaccccgacaacagcgacgtggacaagctgttcatccagctggtgcagacctacaaccagctgttcgaggaaaaccccatcaacgccagcggcgtggacgccaaggccatcctgtctgccagactgagcaagagcagacggctggaaaatctgatcgcccagctgcccggcgagaagaagaatggcctgttcggcaacctgattgccctgagcctgggcctgacccccaacttcaagagcaacttcgacctggccgaggatgccaaactgcagctgagcaaggacacctacgacgacgacctggacaacctgctggcccagatcggcgaccagtacgccgacctgtttctggccgccaagaacctgtccgacgccatcctgctgagcgacatcctgagagtgaacaccgagatcaccaaggcccccctgagcgcctctatgatcaagagatacgacgagcaccaccaggacctgaccctgctgaaagctctcgtgcggcagcagctgcctgagaagtacaaagagattttcttcgaccagagcaagaacggctacgccggctacattgacggcggagccagccaggaagagttctacaagttcatcaagcccatcctggaaaagatggacggcaccgaggaactgctcgtgaagctgaacagagaggacctgctgcggaagcagcggaccttcgacaacggcagcatcccccaccagatccacctgggagagctgcacgccattctgcggcggcaggaagatttttacccattcctgaaggacaaccgggaaaagatcgagaagatcctgaccttccgcatcccctactacgtgggccctctggccaggggaaacagcagattcgcctggatgaccagaaagagcgaggaaaccatcaccccctggaacttcgaggaagtggtggacaagggcgcttccgcccagagcttcatcgagcggatgaccaacttcgataagaacctgcccaacgagaaggtgctgcccaagcacagcctgctgtacgagtacttcaccgtgtataacgagctgaccaaagtgaaatacgtgaccgagggaatgagaaagcccgccttcctgagcggcgagcagaaaaaggccatcgtggacctgctgttcaagaccaaccggaaagtgaccgtgaagcagctgaaagaggactacttcaagaaaatcgagtgcttcgactccgtggaaatctccggcgtggaagatcggttcaacgcctccctgggcacataccacgatctgctgaaaattatcaaggacaaggacttcctggacaatgaggaaaacgaggacattctggaagatatcgtgctgaccctgacactgtttgaggacagagagatgatcgaggaacggctgaaaacctatgcccacctgttcgacgacaaagtgatgaagcagctgaagcggcggagatacaccggctggggcaggctgagccggaagctgatcaacggcatccgggacaagcagtccggcaagacaatcctggatttcctgaagtccgacggcttcgccaacagaaacttcatgcagctgatccacgacgacagcctgacctttaaagaggacatccagaaagcccaggtgtccggccagggcgatagcctgcacgagcacattgccaatctggccggcagccccgccattaagaagggcatcctgcagacagtgaaggtggtggacgagctcgtgaaagtgatgggccggcacaagcccgagaacatcgtgatcgaaatggccagagagaaccagaccacccagaagggacagaagaacagccgcgagagaatgaagcggatcgaagagggcatcaaagagctgggcagccagatcctgaaagaacaccccgtggaaaacacccagctgcagaacgagaagctgtacctgtactacctgcagaatgggcgggatatgtacgtggaccaggaactggacatcaaccggctgtccgactacgatgtggacgccatcgtgcctcagagctttctgaaggacgactccatcgacaacaaggtgctgaccagaagcgacaagaaccggggcaagagcgacaacgtgccctccgaagaggtcgtgaagaagatgaagaactactggcggcagctgctgaacgccaagctgattacccagagaaagttcgacaatctgaccaaggccgagagaggcggcctgagcgaactggataaggccggcttcatcaagagacagctggtggaaacccggcagatcacaaagcacgtggcacagatcctggactcccggatgaacactaagtacgacgagaatgacaagctgatccgggaagtgaaagtgatcaccctgaagtccaagctggtgtccgatttccggaaggatttccagttttacaaagtgcgcgagatcaacaactaccaccacgcccacgacgcctacctgaacgccgtcgtgggaaccgccctgatcaaaaagtaccctaagctggaaagcgagttcgtgtacggcgactacaaggtgtacgacgtgcggaagatgatcgccaagagcgagcaggaaatcggcaaggctaccgccaagtacttcttctacagcaacatcatgaactttttcaagaccgagattaccctggccaacggcgagatccggaagcggcctctgatcgagacaaacggcgaaaccggggagatcgtgtgggataagggccgggattttgccaccgtgcggaaagtgctgagcatgccccaagtgaatatcgtgaaaaagaccgaggtgcagacaggcggcttcagcaaagagtctatcctgcccaagaggaacagcgataagctgatcgccagaaagaaggactgggaccctaagaagtacggcggcttcgacagccccaccgtggcctattctgtgctggtggtggccaaagtggaaaagggcaagtccaagaaactgaagagtgtgaaagagctgctggggatcaccatcatggaaagaagcagcttcgagaagaatcccatcgactttctggaagccaagggctacaaagaagtgaaaaaggacctgatcatcaagctgcctaagtactccctgttcgagctggaaaacggccggaagagaatgctggcctctgccggcgaactgcagaagggaaacgaactggccctgccctccaaatatgtgaacttcctgtacctggccagccactatgagaagctgaagggctcccccgaggataatgagcagaaacagctgtttgtggaacagcacaagcactacctggacgagatcatcgagcagatcagcgagttctccaagagagtgatcctggccgacgctaatctggacaaagtgctgtccgcctacaacaagcaccgggataagcccatcagagagcaggccgagaatatcatccacctgtttaccctgaccaatctgggagcccctgccgccttcaagtactttgacaccaccatcgaccggaagaggtacaccagcaccaaagaggtgctggacgccaccctgatccaccagagcatcaccggcctgtacgagacacggatcgacctgtctcagctgggaggcgacagccccaagaagaagagaaaggtgggagtcgacggatccagcggctccgagaccccaggcacatctgagagcgccacccctgagtccaccggtatgaacaattcacaggggagagtgacattcgaagacgtgaccgtgaacttcacccagggagaatggcagcgcttgaacccagaacaaaggaacctctatcgggacgtgatgctggaaaactactcaaatttggtgagcgttgggcagggtgagaccactaagcctgacgtgatcctgagattggaacagggcaaggagccttggctcgaggaagaggaagtcctgggctcagggagggccgagaaaaacggtgatataggaggccagatatggaagcctaaggacgtcaaggagagcctgagcgctgattacaaagatgatgacgataaagcccccaagaagaaaaggaaggtcccaaagaaaaaaagaaaggtgtga

SEQ ID NO: 1760 - protein, 2318 aa, synthetic construct; identical to SEQ ID NO: 662

SEQ ID NO: 1761 - DNA, 6957 bp, synthetic construct
  source 1..6957: mol_type = other DNA
atgggtaccatgccaaaaaagaagagaaaggtaccgaagaaaaaaagaaaggtatacaatcacgatcaggagttcgacccccctaaggtgtacccaccagtgcctgcagagaagaggaagccaatccgggtgctgagcctgtttgatggcatcgccaccggcctgctggtgctgaaggatctgggcatccaggtggaccggtacatcgcctccgaggtgtgcgaggattctatcaccgtgggcatggtgcgccaccagggcaagatcatgtatgtgggcgacgtgcggtccgtgacacagaagcacatccaggagtggggcccattcgatctggtgatcggcggcagcccctgtaatgacctgtccatcgtgaaccctgcaaggaagggactgtacgagggaaccggccggctgttctttgagttttatagactgctgcacgacgccaggcctaaggagggcgacgatagaccattcttttggctgttcgagaatgtggtggctatgggcgtgagcgataagagggacatctccaggtttctggagtctaaccccgtgatgatcgatgcaaaggaggtgtccgccgcacacagagccaggtatttctggggcaatctgccaggaatgaacaggccactggcaagcaccgtgaatgacaagctggagctgcaggagtgcctggagcacggaaggatcgccaagttttccaaggtgcgcacaatcaccacacggagcaattccatcaagcagggcaaggatcagcacttccccgtgttcatgaacgagaaggaggacatcctgtggtgtaccgagatggagagagtgttcggctttccagtgcactacacagacgtgtctaacatgagcaggctggcaaggcagcggctgctgggcagatcttggagcgtgcccgtgatcaggcacctgttcgcccctctgaaggagtattttgcctgcgtgagcagcggcaactccaatgccaacagccggggcccctctttcagctccggattggtgcctctgagcctgaggggctcccacatggcagcaatccccgccctggaccccgaggccgagcctagcatggacgtgatcctggtgggctctagcgagctgtcctctagcgtgtctccaggaaccggaagggatctgatcgcatacgaggtgaaggccaatcagcggaacatcgaggacatctgtatctgctgtggcagcctgcaggtgcacacacagcacccactgttcgagggaggaatctgcgcaccctgtaaggataagttcctggacgccctgtttctgtacgacgatgacggctaccagtcctattgctctatctgctgttccggcgagaccctgctgatctgcggcaatccagattgtacaaggtgctattgttttgagtgcgtggactctctggtgggaccaggcaccagcggaaaggtgcacgccatgtccaactgggtgtgctacctgtgcctgccatcctctcgcagcggactgctgcagcggagaaggaagtggagatcccagctgaaggccttctatgatagggagtctgagaaccccctggagatgtttgagaccgtgccagtgtggcgccggcagcccgtgagggtgctgagcctgttcgaggatatcaagaaggagctgacatccctgggctttctggagtccggctctgaccccggacagctgaagcacgtggtggatgtgaccgacacagtgcggaaggatgtggaggagtggggccctttcgacctggtgtacggagcaacccctccactgggacacacatgcgacagacccccttcttggtacctgttccagtttcaccgcctgctgcagtatgcaaggccaaagccaggcagccctagaccattcttttggatgttcgtggataatctggtgctgaacaaggaggatctggacgtggccagcaggtttctggagatggagccagtgaccatcccagacgtgcacggcggctccctgcagaatgccgtgcgcgtgtggtctaacatccctgccatcagaagcaggcactgggcactggtgagcgaggaggagctgtccctgctggcccagaataagcagagcagcaagctggccgccaagtggcctacaaagctggtgaagaactgcttcctgccactgcgggagtacttcaagtatttttccaccgagctgacatctagcctgggaggaccctcctctggcgccccaccacctagcggcggctcccctgccggctctccaaccagcacagaggagggcaccagcgagtccgccacaccagagtctggacctggcaccagcacagagccatccgagggctctgccccaggctctcctgcaggcagccctacctccaccgaagagggcaccagcacagagccttctgagggcagcgccccaggcacctctacagagccaagcgagctcgaggacaagaagtacagcatcggcctggccatcggcaccaactctgtgggctgggccgtgatcaccgacgagtacaaggtgcccagcaagaaattcaaggtgctgggcaacaccgaccggcacagcatcaagaagaacctgatcggagccctgctgttcgacagcggcgaaacagccgaggccacccggctgaagagaaccgccagaagaagatacaccagacggaagaaccggatctgctatctgcaagagatcttcagcaacgagatggccaaggtggacgacagcttcttccacagactggaagagtccttcctggtggaagaggataagaagcacgagcggcaccccatcttcggcaacatcgtggacgaggtggcctaccacgagaagtaccccaccatctaccacctgagaaagaaactggtggacagcaccgacaaggccgacctgcggctgatctatctggccctggcccacatgatcaagttccggggccacttcctgatcgagggcgacctgaaccccgacaacagcgacgtggacaagctgttcatccagctggtgcagacctacaaccagctgttcgaggaaaaccccatcaacgccagcggcgtggacgccaaggccatcctgtctgccagactgagcaagagcagacggctggaaaatctgatcgcccagctgcccggcgagaagaagaatggcctgttcggcaacctgattgccctgagcctgggcctgacccccaacttcaagagcaacttcgacctggccgaggatgccaaactgcagctgagcaaggacacctacgacgacgacctggacaacctgctggcccagatcggcgaccagtacgccgacctgtttctggccgccaagaacctgtccgacgccatcctgctgagcgacatcctgagagtgaacaccgagatcaccaaggcccccctgagcgcctctatgatcaagagatacgacgagcaccaccaggacctgaccctgctgaaagctctcgtgcggcagcagctgcctgagaagtacaaagagattttcttcgaccagagcaagaacggctacgccggctacattgacggcggagccagccaggaagagttctacaagttcatcaagcccatcctggaaaagatggacggcaccgaggaactgctcgtgaagctgaacagagaggacctgctgcggaagcagcggaccttcgacaacggcagcatcccccaccagatccacctgggagagctgcacgccattctgcggcggcaggaagatttttacccattcctgaaggacaaccgggaaaagatcgagaagatcctgaccttccgcatcccctactacgtgggccctctggccaggggaaacagcagattcgcctggatgaccagaaagagcgaggaaaccatcaccccctggaacttcgaggaagtggtggacaagggcgcttccgcccagagcttcatcgagcggatgaccaacttcgataagaacctgcccaacgagaaggtgctgcccaagcacagcctgctgtacgagtacttcaccgtgtataacgagctgaccaaagtgaaatacgtgaccgagggaatgagaaagcccgccttcctgagcggcgagcagaaaaaggccatcgtggacctgctgttcaagaccaaccggaaagtgaccgtgaagcagctgaaagaggactacttcaagaaaatcgagtgcttcgactccgtggaaatctccggcgtggaagatcggttcaacgcctccctgggcacataccacgatctgctgaaaattatcaaggacaaggacttcctggacaatgaggaaaacgaggacattctggaagatatcgtgctgaccctgacactgtttgaggacagagagatgatcgaggaacggctgaaaacctatgcccacctgttcgacgacaaagtgatgaagcagctgaagcggcggagatacaccggctggggcaggctgagccggaagctgatcaacggcatccgggacaagcagtccggcaagacaatcctggatttcctgaagtccgacggcttcgccaacagaaacttcatgcagctgatccacgacgacagcctgacctttaaagaggacatccagaaagcccaggtgtccggccagggcgatagcctgcacgagcacattgccaatctggccggcagccccgccattaagaagggcatcctgcagacagtgaaggtggtggacgagctcgtgaaagtgatgggccggcacaagcccgagaacatcgtgatcgaaatggccagagagaaccagaccacccagaagggacagaagaacagccgcgagagaatgaagcggatcgaagagggcatcaaagagctgggcagccagatcctgaaagaacaccccgtggaaaacacccagctgcagaacgagaagctgtacctgtactacctgcagaatgggcgggatatgtacgtggaccaggaactggacatcaaccggctgtccgactacgatgtggacgccatcgtgcctcagagctttctgaaggacgactccatcgacaacaaggtgctgaccagaagcgacaagaaccggggcaagagcgacaacgtgccctccgaagaggtcgtgaagaagatgaagaactactggcggcagctgctgaacgccaagctgattacccagagaaagttcgacaatctgaccaaggccgagagaggcggcctgagcgaactggataaggccggcttcatcaagagacagctggtggaaacccggcagatcacaaagcacgtggcacagatcctggactcccggatgaacactaagtacgacgagaatgacaagctgatccgggaagtgaaagtgatcaccctgaagtccaagctggtgtccgatttccggaaggatttccagttttacaaagtgcgcgagatcaacaactaccaccacgcccacgacgcctacctgaacgccgtcgtgggaaccgccctgatcaaaaagtaccctaagctggaaagcgagttcgtgtacggcgactacaaggtgtacgacgtgcggaagatgatcgccaagagcgagcaggaaatcggcaaggctaccgccaagtacttcttctacagcaacatcatgaactttttcaagaccgagattaccctggccaacggcgagatccggaagcggcctctgatcgagacaaacggcgaaaccggggagatcgtgtgggataagggccgggattttgccaccgtgcggaaagtgctgagcatgccccaagtgaatatcgtgaaaaagaccgaggtgcagacaggcggcttcagcaaagagtctatcctgcccaagaggaacagcgataagctgatcgccagaaagaaggactgggaccctaagaagtacggcggcttcgacagccccaccgtggcctattctgtgctggtggtggccaaagtggaaaagggcaagtccaagaaactgaagagtgtgaaagagctgctggggatcaccatcatggaaagaagcagcttcgagaagaatcccatcgactttctggaagccaagggctacaaagaagtgaaaaaggacctgatcatcaagctgcctaagtactccctgttcgagctggaaaacggccggaagagaatgctggcctctgccggcgaactgcagaagggaaacgaactggccctgccctccaaatatgtgaacttcctgtacctggccagccactatgagaagctgaagggctcccccgaggataatgagcagaaacagctgtttgtggaacagcacaagcactacctggacgagatcatcgagcagatcagcgagttctccaagagagtgatcctggccgacgctaatctggacaaagtgctgtccgcctacaacaagcaccgggataagcccatcagagagcaggccgagaatatcatccacctgtttaccctgaccaatctgggagcccctgccgccttcaagtactttgacaccaccatcgaccggaagaggtacaccagcaccaaagaggtgctggacgccaccctgatccaccagagcatcaccggcctgtacgagacacggatcgacctgtctcagctgggaggcgacagccccaagaagaagagaaaggtgggagtcgacggatccagcggctccgagaccccaggcacatctgagagcgccacccctgagtccaccggtgactccgttgctttcgaggacgtggccgtgaacttcacacttgaggaatgggccttgctcgacccaagtcagaagaatctgtacagagacgtgatgcgggagacattcaggaatctcgccagtgtcggaaagcagtgggaagaccagaacatcgaagatcctttcaagataccacggcgcaatatctcccacattcctgagaggctgtgtgaatctaaggaaggcggacaaggtgaggaaagcgctgattacaaagatgatgacgataaagcccccaagaagaaaaggaaggtcccaaagaaaaaaagaaaggtgtga

SEQ ID NO: 1762 - protein, 2275 aa, synthetic construct
MYPYDVPDYASPKKKRKVNHDQEFDPPKVYPPVPAEKRKPIRVLSLFDGIATGLLVLKDLGIQVDRYIASEVCEDSITVGMVRHQGKIMYVGDVRSVTQKHIQEWGPFDLVIGGSPCNDLSIVNPARKGLYEGTGRLFFEFYRLLHDARPKEGDDRPFFWLFENVVAMGVSDKRDISRFLESNPVMIDAKEVSAAHRARYFWGNLPGMNRPLASTVNDKLELQECLEHGRIAKFSKVRTITTRSNSIKQGKDQHFPVFMNEKEDILWCTEMERVFGFPVHYTDVSNMSRLARQRLLGRSWSVPVIRHLFAPLKEYFACVSSGNSNANSRGPSFSSGLVPLSLRGSHMAAIPALDPEAEPSMDVILVGSSELSSSVSPGTGRDLIAYEVKANQRNIEDICICCGSLQVHTQHPLFEGGICAPCKDKFLDALFLYDDDGYQSYCSICCSGETLLICGNPDCTRCYCFECVDSLVGPGTSGKVHAMSNWVCYLCLPSSRSGLLQRRRKWRSQLKAFYDRESENPLEMFETVPVWRRQPVRVLSLFEDIKKELTSLGFLESGSDPGQLKHVVDVTDTVRKDVEEWGPFDLVYGATPPLGHTCDRPPSWYLFQFHRLLQYARPKPGSPRPFFWMFVDNLVLNKEDLDVASRFLEMEPVTIPDVHGGSLQNAVRVWSNIPAIRSRHWALVSEEELSLLAQNKQSSKLAAKWPTKLVKNCFLPLREYFKYFSTELTSSLGGPSSGAPPPSGGSPAGSPTSTEEGTSESATPESGPGTSTEPSEGSAPGSPAGSPTSTEEGTSTEPSEGSAPGTSTEPSELEDKKYSIGLAIGTNSVGWAVITDEYKVPSKKFKVLGNTDRHSIKKNLIGALLFDSGETAEATRLKRTARRRYTRRKNRICYLQEIFSNEMAKVDDSFFHRLEESFLVEEDKKHERHPIFGNIVDEVAYHEKYPTIYHLRKKLVDSTDKADLRLIYLALAHMIKFRGHFLIEGDLNPDNSDVDKLFIQLVQTYNQLFEENPINASGVDAKAILSARLSKSRRLENLIAQLPGEKKNGLFGNLIALSLGLTPNFKSNFDLAEDAKLQLSKDTYDDDLDNLLAQIGDQYADLFLAAKNLSDAILLSDILRVNTEITKAPLSASMIKRYDEHHQDLTLLKALVRQQLPEKYKEIFFDQSKNGYAGYIDGGASQEEFYKFIKPILEKMDGTEELLVKLNREDLLRKQRTFDNGSIPHQIHLGELHAILRRQEDFYPFLKDNREKIEKILTFRIPYYVGPLARGNSRFAWMTRKSEETITPWNFEEVVDKGASAQSFIERMTNFDKNLPNEKVLPKHSLLYEYFTVYNELTKVKYVTEGMRKPAFLSGEQKKAIVDLLFKTNRKVTVKQLKEDYFKKIECFDSVEISGVEDRFNASLGTYHDLLKIIKDKDFLDNEENEDILEDIVLTLTLFEDREMIEERLKTYAHLFDDKVMKQLKRRRYTGWGRLSRKLINGIRDKQSGKTILDFLKSDGFANRNFMQLIHDDSLTFKEDIQKAQVSGQGDSLHEHIANLAGSPAIKKGILQTVKVVDELVKVMGRHKPENIVIEMARENQTTQKGQKNSRERMKRIEEGIKELGSQILKEHPVENTQLQNEKLYLYYLQNGRDMYVDQELDINRLSDYDVDAIVPQSFLKDDSIDNKVLTRSDKNRGKSDNVPSEEVVKKMKNYWRQLLNAKLITQRKFDNLTKAERGGLSELDKAGFIKRQLVETRQITKHVAQILDSRMNTKYDENDKLIREVKVITLKSKLVSDFRKDFQFYKVREINNYHHAHDAYLNAVVGTALIKKYPKLESEFVYGDYKVYDVRKMIAKSEQEIGKATAKYFFYSNIMNFFKTEITLANGEIRKRPLIETNGETGEIVWDKGRDFATVRKVLSMPQVNIVKKTEVQTGGFSKESILPKRNSDKLIARKKDWDPKKYGGFDSPTVAYSVLVVAKVEKGKSKKLKSVKELLGITIMERSSFEKNPIDFLEAKGYKEVKKDLIIKLPKYSLFELENGRKRMLASAGELQKGNELALPSKYVNFLYLASHYEKLKGSPEDNEQKQLFVEQHKHYLDEIIEQISEFSKRVILADANLDKVLSAYNKHRDKPIREQAENIIHLFTLTNLGAPAAFKYFDTTIDRKRYTSTKEVLDATLIHQSITGLYETRIDLSQLGGDSPKKKRKVGVDGSSGSETPGTSESATPESRTLVTFKDVFVDFTREEWKLLDTAQQIVYRNVMLENYKNLVSLGYQLTKPDVILRLEKGEEPWLV

SEQ ID NO: 1763 - DNA, 6828 bp, synthetic construct
  source 1..6828: mol_type = other DNA
atgtacccatacgatgttccagattacgcttcgccgaagaaaaagcgcaaggtcaatcacgatcaggagttcgacccccctaaggtgtacccaccagtgcctgcagagaagaggaagccaatccgggtgctgagcctgtttgatggcatcgccaccggcctgctggtgctgaaggatctgggcatccaggtggaccggtacatcgcctccgaggtgtgcgaggattctatcaccgtgggcatggtgcgccaccagggcaagatcatgtatgtgggcgacgtgcggtccgtgacacagaagcacatccaggagtggggcccattcgatctggtgatcggcggcagcccctgtaatgacctgtccatcgtgaaccctgcaaggaagggactgtacgagggaaccggccggctgttctttgagttttatagactgctgcacgacgccaggcctaaggagggcgacgatagaccattcttttggctgttcgagaatgtggtggctatgggcgtgagcgataagagggacatctccaggtttctggagtctaaccccgtgatgatcgatgcaaaggaggtgtccgccgcacacagagccaggtatttctggggcaatctgccaggaatgaacaggccactggcaagcaccgtgaatgacaagctggagctgcaggagtgcctggagcacggaaggatcgccaagttttccaaggtgcgcacaatcaccacacggagcaattccatcaagcagggcaaggatcagcacttccccgtgttcatgaacgagaaggaggacatcctgtggtgtaccgagatggagagagtgttcggctttccagtgcactacacagacgtgtctaacatgagcaggctggcaaggcagcggctgctgggcagatcttggagcgtgcccgtgatcaggcacctgttcgcccctctgaaggagtattttgcctgcgtgagcagcggcaactccaatgccaacagccggggcccctctttcagctccggattggtgcctctgagcctgaggggctcccacatggcagcaatccccgccctggaccccgaggccgagcctagcatggacgtgatcctggtgggctctagcgagctgtcctctagcgtgtctccaggaaccggaagggatctgatcgcatacgaggtgaaggccaatcagcggaacatcgaggacatctgtatctgctgtggcagcctgcaggtgcacacacagcacccactgttcgagggaggaatctgcgcaccctgtaaggataagttcctggacgccctgtttctgtacgacgatgacggctaccagtcctattgctctatctgctgttccggcgagaccctgctgatctgcggcaatccagattgtacaaggtgctattgttttgagtgcgtggactctctggtgggaccaggcaccagcggaaaggtgcacgccatgtccaactgggtgtgctacctgtgcctgccatcctctcgcagcggactgctgcagcggagaaggaagtggagatcccagctgaaggccttctatgatagggagtctgagaaccccctggagatgtttgagaccgtgccagtgtggcgccggcagcccgtgagggtgctgagcctgttcgaggatatcaagaaggagctgacatccctgggctttctggagtccggctctgaccccggacagctgaagcacgtggtggatgtgaccgacacagtgcggaaggatgtggaggagtggggccctttcgacctggtgtacggagcaacccctccactgggacacacatgcgacagacccccttcttggtacctgttccagtttcaccgcctgctgcagtatgcaaggccaaagccaggcagccctagaccattcttttggatgttcgtggataatctggtgctgaacaaggaggatctggacgtggccagcaggtttctggagatggagccagtgaccatcccagacgtgcacggcggctccctgcagaatgccgtgcgcgtgtggtctaacatccctgccatcagaagcaggcactgggcactggtgagcgaggaggagctgtccctgctggcccagaataagcagagcagcaagctggccgccaagtggcctacaaagctggtgaagaactgcttcctgccactgcgggagtacttcaagtatttttccaccgagctgacatctagcctgggaggaccctcctctggcgccccaccacctagcggcggctcccctgccggctctccaaccagcacagaggagggcaccagcgagtccgccacaccagagtctggacctggcaccagcacagagccatccgagggctctgccccaggctctcctgcaggcagccctacctccaccgaagagggcaccagcacagagccttctgagggcagcgccccaggcacctctacagagccaagcgagctcgaggacaagaagtacagcatcggcctggccatcggcaccaactctgtgggctgggccgtgatcaccgacgagtacaaggtgcccagcaagaaattcaaggtgctgggcaacaccgaccggcacagcatcaagaagaacctgatcggagccctgctgttcgacagcggcgaaacagccgaggccacccggctgaagagaaccgccagaagaagatacaccagacggaagaaccggatctgctatctgcaagagatcttcagcaacgagatggccaaggtggacgacagcttcttccacagactggaagagtccttcctggtggaagaggataagaagcacgagcggcaccccatcttcggcaacatcgtggacgaggtggcctaccacgagaagtaccccaccatctaccacctgagaaagaaactggtggacagcaccgacaaggccgacctgcggctgatctatctggccctggcccacatgatcaagttccggggccacttcctgatcgagggcgacctgaaccccgacaacagcgacgtggacaagctgttcatccagctggtgcagacctacaaccagctgttcgaggaaaaccccatcaacgccagcggcgtggacgccaaggccatcctgtctgccagactgagcaagagcagacggctggaaaatctgatcgcccagctgcccggcgagaagaagaatggcctgttcggcaacctgattgccctgagcctgggcctgacccccaacttcaagagcaacttcgacctggccgaggatgccaaactgcagctgagcaaggacacctacgacgacgacctggacaacctgctggcccagatcggcgaccagtacgccgacctgtttctggccgccaagaacctgtccgacgccatcctgctgagcgacatcctgagagtgaacaccgagatcaccaaggcccccctgagcgcctctatgatcaagagatacgacgagcaccaccaggacctgaccctgctgaaagctctcgtgcggcagcagctgcctgagaagtacaaagagattttcttcgaccagagcaagaacggctacgccggctacattgacggcggagccagccaggaagagttctacaagttcatcaagcccatcctggaaaagatggacggcaccgaggaactgctcgtgaagctgaacagagaggacctgctgcggaagcagcggaccttcgacaacggcagcatcccccaccagatccacctgggagagctgcacgccattctgcggcggcaggaagatttttacccattcctgaaggacaaccgggaaaagatcgagaagatcctgaccttccgcatcccctactacgtgggccctctggccaggggaaacagcagattcgcctggatgaccagaaagagcgaggaaaccatcaccccctggaacttcgaggaagtggtggacaagggcgcttccgcccagagcttcatcgagcggatgaccaacttcgataagaacctgcccaacgagaaggtgctgcccaagcacagcctgctgtacgagtacttcaccgtgtataacgagctgaccaaagtgaaatacgtgaccgagggaatgagaaagcccgccttcctgagcggcgagcagaaaaaggccatcgtggacctgctgttcaagaccaaccggaaagtgaccgtgaagcagctgaaagaggactacttcaagaaaatcgagtgcttcgactccgtggaaatctccggcgtggaagatcggttcaacgcctccctgggcacataccacgatctgctgaaaattatcaaggacaaggacttcctggacaatgaggaaaacgaggacattctggaagatatcgtgctgaccctgacactgtttgaggacagagagatgatcgaggaacggctgaaaacctatgcccacctgttcgacgacaaagtgatgaagcagctgaagcggcggagatacaccggctggggcaggctgagccggaagctgatcaacggcatccgggacaagcagtccggcaagacaatcctggatttcctgaagtccgacggcttcgccaacagaaacttcatgcagctgatccacgacgacagcctgacctttaaagaggacatccagaaagcccaggtgtccggccagggcgatagcctgcacgagcacattgccaatctggccggcagccccgccattaagaagggcatcctgcagacagtgaaggtggtggacgagctcgtgaaagtgatgggccggcacaagcccgagaacatcgtgatcgaaatggccagagagaaccagaccacccagaagggacagaagaacagccgcgagagaatgaagcggatcgaagagggcatcaaagagctgggcagccagatcctgaaagaacaccccgtggaaaacacccagctgcagaacgagaagctgtacctgtactacctgcagaatgggcgggatatgtacgtggaccaggaactggacatcaaccggctgtccgactacgatgtggacgccatcgtgcctcagagctttctgaaggacgactccatcgacaacaaggtgctgaccagaagcgacaagaaccggggcaagagcgacaacgtgccctccgaagaggtcgtgaagaagatgaagaactactggcggcagctgctgaacgccaagctgattacccagagaaagttcgacaatctgaccaaggccgagagaggcggcctgagcgaactggataaggccggcttcatcaagagacagctggtggaaacccggcagatcacaaagcacgtggcacagatcctggactcccggatgaacactaagtacgacgagaatgacaagctgatccgggaagtgaaagtgatcaccctgaagtccaagctggtgtccgatttccggaaggatttccagttttacaaagtgcgcgagatcaacaactaccaccacgcccacgacgcctacctgaacgccgtcgtgggaaccgccctgatcaaaaagtaccctaagctggaaagcgagttcgtgtacggcgactacaaggtgtacgacgtgcggaagatgatcgccaagagcgagcaggaaatcggcaaggctaccgccaagtacttcttctacagcaacatcatgaactttttcaagaccgagattaccctggccaacggcgagatccggaagcggcctctgatcgagacaaacggcgaaaccggggagatcgtgtgggataagggccgggattttgccaccgtgcggaaagtgctgagcatgccccaagtgaatatcgtgaaaaagaccgaggtgcagacaggcggcttcagcaaagagtctatcctgcccaagaggaacagcgataagctgatcgccagaaagaaggactgggaccctaagaagtacggcggcttcgacagccccaccgtggcctattctgtgctggtggtggccaaagtggaaaagggcaagtccaagaaactgaagagtgtgaaagagctgctggggatcaccatcatggaaagaagcagcttcgagaagaatcccatcgactttctggaagccaagggctacaaagaagtgaaaaaggacctgatcatcaagctgcctaagtactccctgttcgagctggaaaacggccggaagagaatgctggcctctgccggcgaactgcagaagggaaacgaactggccctgccctccaaatatgtgaacttcctgtacctggccagccactatgagaagctgaagggctcccccgaggataatgagcagaaacagctgtttgtggaacagcacaagcactacctggacgagatcatcgagcagatcagcgagttctccaagagagtgatcctggccgacgctaatctggacaaagtgctgtccgcctacaacaagcaccgggataagcccatcagagagcaggccgagaatatcatccacctgtttaccctgaccaatctgggagcccctgccgccttcaagtactttgacaccaccatcgaccggaagaggtacaccagcaccaaagaggtgctggacgccaccctgatccaccagagcatcaccggcctgtacgagacacggatcgacctgtctcagctgggaggcgacagccccaagaagaagagaaaggtgggagtcgacggatccagcggctccgagaccccaggcacatctgagagcgccacccctgagtcccggaccctggtgacattcaaggacgtgttcgtggacttcacccgggaggagtggaagctgctggacacagcccagcagatcgtgtacaggaacgtgatgctggagaactataagaatctggtgtctctgggctaccagctgacaaagccagatgtgatcctgcggctggagaagggagaggagccctggctggtgtag

SEQ ID NO: 1764 - protein, 2090 aa, synthetic construct
MGTMNHDQEFDPPKVYPPVPAEKRKPIRVLSLFDGIATGLLVLKDLGIQVDRYIASEVCEDSITVGMVRHQGKIMYVGDVRSVTQKHIQEWGPFDLVIGGSPCNDLSIVNPARKGLYEGTGRLFFEFYRLLHDARPKEGDDRPFFWLFENVVAMGVSDKRDISRFLESNPVMIDAKEVSAAHRARYFWGNLPGMNRPLASTVNDKLELQECLEHGRIAKFSKVRTITTRSNSIKQGKDQHFPVFMNEKEDILWCTEMERVFGFPVHYTDVSNMSRLARQRLLGRSWSVPVIRHLFAPLKEYFACVSSGNSNANSRGPSFSSGLVPLSLRGSHMGPMEIYKTVSAWKRQPVRVLSLFRNIDKVLKSLGFLESGSGSGGGTLKYVEDVTNVVRRDVEKWGPFDLVYGSTQPLGSSCDRCPGWYMFQFHRILQYALPRQESQRPFFWIFMDNLLLTEDDQETTTRFLQTEAVTLQDVRGRDYQNAMRVWSNIPGLKSKHAPLTPKEEEYLQAQVRSRSKLDAPKVDLLVKNCLLPLREYFKYFSQNSLPLGGPSSGAPPPSGGSPAGSPTSTEEGTSESATPESGPGTSTEPSEGSAPGSPAGSPTSTEEGTSTEPSEGSAPGTSTEPSEPKKKRKVYMDKKYSIGLAIGTNSVGWAVITDEYKVPSKKFKVLGNTDRHSIKKNLIGALLFDSGETAEATRLKRTARRRYTRRKNRICYLQEIFSNEMAKVDDSFFHRLEESFLVEEDKKHERHPIFGNIVDEVAYHEKYPTIYHLRKKLVDSTDKADLRLIYLALAHMIKFRGHFLIEGDLNPDNSDVDKLFIQLVQTYNQLFEENPINASGVDAKAILSARLSKSRRLENLIAQLPGEKKNGLFGNLIALSLGLTPNFKSNFDLAEDAKLQLSKDTYDDDLDNLLAQIGDQYADLFLAAKNLSDAILLSDILRVNTEITKAPLSASMIKRYDEHHQDLTLLKALVRQQLPEKYKEIFFDQSKNGYAGYIDGGASQEEFYKFIKPILEKMDGTEELLVKLNREDLLRKQRTFDNGSIPHQIHLGELHAILRRQEDFYPFLKDNREKIEKILTFRIPYYVGPLARGNSRFAWMTRKSEETITPWNFEEVVDKGASAQSFIERMTNFDKNLPNEKVLPKHSLLYEYFTVYNELTKVKYVTEGMRKPAFLSGEQKKAIVDLLFKTNRKVTVKQLKEDYFKKIECFDSVEISGVEDRFNASLGTYHDLLKIIKDKDFLDNEENEDILEDIVLTLTLFEDREMIEERLKTYAHLFDDKVMKQLKRRRYTGWGRLSRKLINGIRDKQSGKTILDFLKSDGFANRNFMQLIHDDSLTFKEDIQKAQVSGQGDSLHEHIANLAGSPAIKKGILQTVKVVDELVKVMGRHKPENIVIEMARENQTTQKGQKNSRERMKRIEEGIKELGSQILKEHPVENTQLQNEKLYLYYLQNGRDMYVDQELDINRLSDYDVDAIVPQSFLKDDSIDNKVLTRSDKNRGKSDNVPSEEVVKKMKNYWRQLLNAKLITQRKFDNLTKAERGGLSELDKAGFIKRQLVETRQITKHVAQILDSRMNTKYDENDKLIREVKVITLKSKLVSDFRKDFQFYKVREINNYHHAHDAYLNAVVGTALIKKYPKLESEFVYGDYKVYDVRKMIAKSEQEIGKATAKYFFYSNIMNFFKTEITLANGEIRKRPLIETNGETGEIVWDKGRDFATVRKVLSMPQVNIVKKTEVQTGGFSKESILPKRNSDKLIARKKDWDPKKYGGFDSPTVAYSVLVVAKVEKGKSKKLKSVKELLGITIMERSSFEKNPIDFLEAKGYKEVKKDLIIKLPKYSLFELENGRKRMLASAGELQKGNELALPSKYVNFLYLASHYEKLKGSPEDNEQKQLFVEQHKHYLDEIIEQISEFSKRVILADANLDKVLSAYNKHRDKPIREQAENIIHLFTLTNLGAPAAFKYFDTTIDRKRYTSTKEVLDATLIHQSITGLYETRIDLSQLGGDPKKKRKVSGSETPGTSESATPESTGRTLVTFKDVFVDFTREEWKLLDTAQQIVYRNVMLENYKNLVSLGYQLTKPDVILRLEKGEEP

SEQ ID NO: 1765 - DNA, 6273 bp, synthetic construct
  source 1..6273: mol_type = other DNA
atgggtaccatgaaccatgaccaggaatttgaccccccaaaggtttacccacctgtgccagctgagaagaggaagcccatccgcgtgctgtctctctttgatgggattgctacagggctcctggtgctgaaggacctgggcatccaagtggaccgctacattgcctccgaggtgtgtgaggactccatcacggtgggcatggtgcggcaccagggaaagatcatgtacgtcggggacgtccgcagcgtcacacagaagcatatccaggagtggggcccattcgacctggtgattggaggcagtccctgcaatgacctctccattgtcaaccctgcccgcaagggactttatgagggtactggccgcctcttctttgagttctaccgcctcctgcatgatgcgcggcccaaggagggagatgatcgccccttcttctggctctttgagaatgtggtggccatgggcgttagtgacaagagggacatctcgcgatttcttgagtctaaccccgtgatgattgacgccaaagaagtgtctgctgcacacagggcccgttacttctggggtaaccttcctggcatgaacaggcctttggcatccactgtgaatgataagctggagctgcaagagtgtctggagcacggcagaatagccaagttcagcaaagtgaggaccattaccaccaggtcaaactctataaagcagggcaaagaccagcatttccccgtcttcatgaacgagaaggaggacatcctgtggtgcactgaaatggaaagggtgtttggcttccccgtccactacacagacgtctccaacatgagccgcttggcgaggcagagactgctgggccgatcgtggagcgtgccggtcatccgccacctcttcgctccgctgaaggaatattttgcttgtgtgtctagcggcaatagtaacgctaacagccgcgggccgagcttcagcagcggcctggtgccgttaagcttgcgcggcagccatatgggccctatggagatatacaagacagtgtctgcatggaagagacagccagtgcgggtactgagcctcttcagaaacatcgacaaggtactaaagagtttgggcttcttggaaagcggttctggttctgggggaggaacgctgaagtacgtggaagatgtcacaaatgtcgtgaggagagacgtggagaaatggggcccctttgacctggtgtacggctcgacgcagcccctaggcagctcttgtgatcgctgtcccggctggtacatgttccagttccaccggatcctgcagtatgcgctgcctcgccaggagagtcagcggcccttcttctggatattcatggacaatctgctgctgactgaggatgaccaagagacaactacccgcttccttcagacagaggctgtgaccctccaggatgtccgtggcagagactaccagaatgctatgcgggtgtggagcaacattccagggctgaagagcaagcatgcgcccctgaccccaaaggaagaagagtatctgcaagcccaagtcagaagcaggagcaagctggacgccccgaaagttgacctcctggtgaagaactgccttctcccgctgagagagtacttcaagtatttttctcaaaactcacttcctcttggagggccgagctctggcgcacccccaccaagtggagggtctcctgccgggtccccaacatctactgaagaaggcaccagcgaatccgcaacgcccgagtcaggccctggtacctccacagaaccatctgaaggtagtgcgcctggttccccagctggaagccctacttccaccgaagaaggcacgtcaaccgaaccaagtgaaggatctgcccctgggaccagcactgaaccatctgagccaaaaaagaagagaaaggtatacatggacaagaagtacagcatcggcctggccatcggcaccaactctgtgggctgggccgtgatcaccgacgagtacaaggtgcccagcaagaaattcaaggtgctgggcaacaccgaccggcacagcatcaagaagaacctgatcggcgccctgctgttcgacagcggagaaacagccgaggccacccggctgaagagaaccgccagaagaagatacaccagacggaagaaccggatctgctatctgcaagagatcttcagcaacgagatggccaaggtggacgacagcttcttccacagactggaagagtccttcctggtggaagaggataagaagcacgagcggcaccccatcttcggcaacatcgtggacgaggtggcctaccacgagaagtaccccaccatctaccacctgagaaagaaactggtggacagcaccgacaaggccgacctgcggctgatctatctggccctggcccacatgatcaagttccggggccacttcctgatcgagggcgacctgaaccccgacaacagcgacgtggacaagctgttcatccagctggtgcagacctacaaccagctgttcgaggaaaaccccatcaacgccagcggcgtggacgccaaggccatcctgtctgccagactgagcaagagcagacggctggaaaatctgatcgcccagctgcccggcgagaagaagaatggcctgttcggcaacctgattgccctgagcctgggcctgacccccaacttcaagagcaacttcgacctggccgaggatgccaaactgcagctgagcaaggacacctacgacgacgacctggacaacctgctggcccagatcggcgaccagtacgccgacctgtttctggccgccaagaacctgtccgacgccatcctgctgagcgacatcctgagagtgaacaccgagatcaccaaggcccccctgagcgcctctatgatcaagagatacgacgagcaccaccaggacctgaccctgctgaaagctctcgtgcggcagcagctgcctgagaagtacaaagagattttcttcgaccagagcaagaacggctacgccggctacatcgatggcggagccagccaggaagagttctacaagttcatcaagcccatcctggaaaagatggacggcaccgaggaactgctcgtgaagctgaacagagaggacctgctgcggaagcagcggaccttcgacaacggcagcatcccccaccagatccacctgggagagctgcacgccattctgcggcggcaggaagatttttacccattcctgaaggacaaccgggaaaagatcgagaagatcctgaccttccgcatcccctactacgtgggccctctggccaggggaaacagcagattcgcctggatgaccagaaagagcgaggaaaccatcaccccctggaacttcgaggaagtggtggacaagggcgccagcgcccagagcttcatcgagcggatgaccaacttcgataagaacctgcccaacgagaaggtgctgcccaagcacagcctgctgtacgagtacttcaccgtgtacaacgagctgaccaaagtgaaatacgtgaccgagggaatgagaaagcccgccttcctgagcggcgagcagaaaaaagccatcgtggacctgctgttcaagaccaaccggaaagtgaccgtgaagcagctgaaagaggactacttcaagaaaatcgagtgcttcgactccgtggaaatctccggcgtggaagatcggttcaacgcctccctgggcacataccacgatctgctgaaaattatcaaggacaaggacttcctggacaatgaggaaaacgaggacattctggaagatatcgtgctgaccctgacactgtttgaggacagagagatgatcgaggaacggctgaaaacctatgcccacctgttcgacgacaaagtgatgaagcagctgaagcggcggagatacaccggctggggcaggctgagccggaagctgatcaacggcatccgggacaagcagtccggcaagacaatcctggatttcctgaagtccgacggcttcgccaacagaaacttcatgcagctgatccacgacgacagcctgacctttaaagaggacatccagaaagcccaggtgtccggccagggcgatagcctgcacgagcacattgccaatctggccggcagccccgccattaagaagggcatcctgcagacagtgaaggtggtggacgagctcgtgaaagtgatgggccggcacaagcccgagaacatcgtgatcgaaatggccagagagaaccagaccacccagaagggacagaagaacagccgcgagagaatgaagcggatcgaagagggcatcaaagagctgggcagccagatcctgaaagaacaccccgtggaaaacacccagctgcagaacgagaagctgtacctgtactacctgcagaatgggcgggatatgtacgtggaccaggaactggacatcaaccggctgtccgactacgatgtggacgctatcgtgcctcagagctttctgaaggacgactccatcgataacaaagtgctgactcggagcgacaagaaccggggcaagagcgacaacgtgccctccgaagaggtcgtgaagaagatgaagaactactggcgccagctgctgaatgccaagctgattacccagaggaagttcgacaatctgaccaaggccgagagaggcggcctgagcgaactggataaggccggcttcatcaagagacagctggtggaaacccggcagatcacaaagcacgtggcacagatcctggactcccggatgaacactaagtacgacgagaacgacaaactgatccgggaagtgaaagtgatcaccctgaagtccaagctggtgtccgatttccggaaggatttccagttttacaaagtgcgcgagatcaacaactaccaccacgcccacgacgcctacctgaacgccgtcgtgggaaccgccctgatcaaaaagtaccctaagctggaaagcgagttcgtgtacggcgactacaaggtgtacgacgtgcggaagatgatcgccaagagcgagcaggaaatcggcaaggctaccgccaagtacttcttctacagcaacatcatgaactttttcaagaccgagattaccctggccaacggcgagatccggaagcggcctctgatcgagacaaacggcgaaacaggcgagatcgtgtgggataagggccgggactttgccaccgtgcggaaagtgctgtctatgccccaagtgaatatcgtgaaaaagaccgaggtgcagacaggcggcttcagcaaagagtctatcctgcccaagaggaacagcgacaagctgatcgccagaaagaaggactgggaccctaagaagtacggcggcttcgacagccccaccgtggcctattctgtgctggtggtggccaaagtggaaaagggcaagtccaagaaactgaagagtgtgaaagagctgctggggatcaccatcatggaaagaagcagcttcgagaagaatcccatcgactttctggaagccaagggctacaaagaagtgaaaaaggacctgatcatcaagctgcctaagtactccctgttcgagctggaaaacggccggaagagaatgctggcctctgccggcgaactgcagaagggaaacgaactggccctgccctccaaatatgtgaacttcctgtacctggccagccactatgagaagctgaagggctcccccgaggataatgagcagaaacagctgtttgtggaacagcacaaacactacctggacgagatcatcgagcagatcagcgagttctccaagagagtgatcctggccgacgctaatctggacaaggtgctgagcgcctacaacaagcacagagacaagcctatcagagagcaggccgagaatatcatccacctgtttaccctgaccaatctgggagcccctgccgccttcaagtactttgacaccaccatcgaccggaagaggtacaccagcaccaaagaggtgctggacgccaccctgatccaccagagcatcaccggcctgtacgagacacggatcgacctgtctcagctgggaggcgacccaaaaaagaagagaaaggtaagcggaagtgagaccccaggtacatccgaatcagcaacgcctgaaagcaccggtcggacactggtgaccttcaaggatgtatttgtggacttcaccagggaggagtggaagctgctggacactgctcagcagatcgtgtacagaaatgtgatgctggagaactataagaacctggtttccttgggttatcagcttactaagccagatgtgatcctccggttggagaagggagaagagccctga

SEQ ID NO: 1766 - protein, 2153 aa, synthetic construct
MGTMPKKKRKVPKKKRKVYNHDQEFDPPKVYPPVPAEKRKPIRVLSLFDGIATGLLVLKDLGIQVDRYIASEVCEDSITVGMVRHQGKIMYVGDVRSVTQKHIQEWGPFDLVIGGSPCNDLSIVNPARKGLYEGTGRLFFEFYRLLHDARPKEGDDRPFFWLFENVVAMGVSDKRDISRFLESNPVMIDAKEVSAAHRARYFWGNLPGMNRPLASTVNDKLELQECLEHGRIAKFSKVRTITTRSNSIKQGKDQHFPVFMNEKEDILWCTEMERVFGFPVHYTDVSNMSRLARQRLLGRSWSVPVIRHLFAPLKEYFACVSSGNSNANSRGPSFSSGLVPLSLRGSHMGPMEIYKTVSAWKRQPVRVLSLFRNIDKVLKSLGFLESGSGSGGGTLKYVEDVTNVVRRDVEKWGPFDLVYGSTQPLGSSCDRCPGWYMFQFHRILQYALPRQESQRPFFWIFMDNLLLTEDDQETTTRFLQTEAVTLQDVRGRDYQNAMRVWSNIPGLKSKHAPLTPKEEEYLQAQVRSRSKLDAPKVDLLVKNCLLPLREYFKYFSQNSLPLGGPSSGAPPPSGGSPAGSPTSTEEGTSESATPESGPGTSTEPSEGSAPGSPAGSPTSTEEGTSTEPSEGSAPGTSTEPSEMDKKYSIGLAIGTNSVGWAVITDEYKVPSKKFKVLGNTDRHSIKKNLIGALLFDSGETAEATRLKRTARRRYTRRKNRICYLQEIFSNEMAKVDDSFFHRLEESFLVEEDKKHERHPIFGNIVDEVAYHEKYPTIYHLRKKLVDSTDKADLRLIYLALAHMIKFRGHFLIEGDLNPDNSDVDKLFIQLVQTYNQLFEENPINASGVDAKAILSARLSKSRRLENLIAQLPGEKKNGLFGNLIALSLGLTPNFKSNFDLAEDAKLQLSKDTYDDDLDNLLAQIGDQYADLFLAAKNLSDAILLSDILRVNTEITKAPLSASMIKRYDEHHQDLTLLKALVRQQLPEKYKEIFFDQSKNGYAGYIDGGASQEEFYKFIKPILEKMDGTEELLVKLNREDLLRKQRTFDNGSIPHQIHLGELHAILRRQEDFYPFLKDNREKIEKILTFRIPYYVGPLARGNSRFAWMTRKSEETITPWNFEEVVDKGASAQSFIERMTNFDKNLPNEKVLPKHSLLYEYFTVYNELTKVKYVTEGMRKPAFLSGEQKKAIVDLLFKTNRKVTVKQLKEDYFKKIECFDSVEISGVEDRFNASLGTYHDLLKIIKDKDFLDNEENEDILEDIVLTLTLFEDREMIEERLKTYAHLFDDKVMKQLKRRRYTGWGRLSRKLINGIRDKQSGKTILDFLKSDGFANRNFMQLIHDDSLTFKEDIQKAQVSGQGDSLHEHIANLAGSPAIKKGILQTVKVVDELVKVMGRHKPENIVIEMARENQTTQKGQKNSRERMKRIEEGIKELGSQILKEHPVENTQLQNEKLYLYYLQNGRDMYVDQELDINRLSDYDVDAIVPQSFLKDDSIDNKVLTRSDKNRGKSDNVPSEEVVKKMKNYWRQLLNAKLITQRKFDNLTKAERGGLSELDKAGFIKRQLVETRQITKHVAQILDSRMNTKYDENDKLIREVKVITLKSKLVSDFRKDFQFYKVREINNYHHAHDAYLNAVVGTALIKKYPKLESEFVYGDYKVYDVRKMIAKSEQEIGKATAKYFFYSNIMNFFKTEITLANGEIRKRPLIETNGETGEIVWDKGRDFATVRKVLSMPQVNIVKKTEVQTGGFSKESILPKRNSDKLIARKKDWDPKKYGGFDSPTVAYSVLVVAKVEKGKSKKLKSVKELLGITIMERSSFEKNPIDFLEAKGYKEVKKDLIIKLPKYSLFELENGRKRMLASAGELQKGNELALPSKYVNFLYLASHYEKLKGSPEDNEQKQLFVEQHKHYLDEIIEQISEFSKRVILADANLDKVLSAYNKHRDKPIREQAENIIHLFTLTNLGAPAAFKYFDTTIDRKRYTSTKEVLDATLIHQSITGLYETRIDLSQLGGDSGSETPGTSESATPESTGMNNSQGRVTFEDVTVNFTQGEWQRLNPEQRNLYRDVMLENYSNLVSVGQGETTKPDVILRLEQGKEPWLEEEEVLGSGRAEKNGDIGGQIWKPKDVKESLSADYKDDDDKAPKKKRKVPKKKRKV

SEQ ID NO: 1767 - DNA, 6462 bp, synthetic construct
  source 1..6462: mol_type = other DNA
atgggtaccatgccaaaaaagaagagaaaggtaccgaagaaaaaaagaaaggtatacaaccatgaccaggaattcgaccccccaaaggtttacccacctgtgccagctgagaagaggaagcccatccgcgtgctgtctctctttgatgggattgctacagggctcctggtgctgaaggacctgggcatccaagtggaccgctacattgcctccgaggtgtgtgaggactccatcacggtgggcatggtgcggcaccagggaaagatcatgtacgtcggggacgtccgcagcgtcacacagaagcatatccaggagtggggcccattcgacctggtgattggaggcagtccctgcaatgacctctccattgtcaaccctgcccgcaagggactttatgagggtactggccgcctcttctttgagttctaccgcctcctgcatgatgcgcggcccaaggagggagatgatcgccccttcttctggctctttgagaatgtggtggccatgggcgttagtgacaagagggacatctcgcgatttcttgagtctaaccccgtgatgattgacgccaaagaagtgtctgctgcacacagggcccgttacttctggggtaaccttcctggcatgaacaggcctttggcatccactgtgaatgataagctggagctgcaagagtgtctggagcacggcagaatagccaagttcagcaaagtgaggaccattaccaccaggtcaaactctataaagcagggcaaagaccagcatttccccgtcttcatgaacgagaaggaggacatcctgtggtgcactgaaatggaaagggtgtttggcttccccgtccactacacagacgtctccaacatgagccgcttggcgaggcagagactgctgggccgatcgtggagcgtgccggtcatccgccacctcttcgctccgctgaaggaatattttgcttgtgtgtctagcggcaatagtaacgctaacagccgcgggccgagcttcagcagcggcctggtgccgttaagcttgcgcggcagccatatgggccctatggagatatacaagacagtgtctgcatggaagagacagccagtgcgggtactgagcctcttcagaaacatcgacaaggtactaaagagtttgggcttcttggaaagcggttctggttctgggggaggaacgctgaagtacgtggaagatgtcacaaatgtcgtgaggagagacgtggagaaatggggcccctttgacctggtgtacggctcgacgcagcccctaggcagctcttgtgatcgctgtcccggctggtacatgttccagttccaccggatcctgcagtatgcgctgcctcgccaggagagtcagcggcccttcttctggatattcatggacaatctgctgctgactgaggatgaccaagagacaactacccgcttccttcagacagaggctgtgaccctccaggatgtccgtggcagagactaccagaatgctatgcgggtgtggagcaacattccagggctgaagagcaagcatgcgcccctgaccccaaaggaagaagagtatctgcaagcccaagtcagaagcaggagcaagctggacgccccgaaagttgacctcctggtgaagaactgccttctcccgctgagagagtacttcaagtatttttctcaaaactcacttcctcttggagggccgagctctggcgcacccccaccaagtggagggtctcctgccgggtccccaacatctactgaagaaggcaccagcgaatccgcaacgcccgagtcaggccctggtacctccacagaaccatctgaaggtagtgcgcctggttccccagctggaagccctacttccaccgaagaaggcacgtcaaccgaaccaagtgaaggatctgcccctgggaccagcactgaaccatctgagatggacaagaagtacagcatcggcctggccatcggcaccaactctgtgggctgggccgtgatcaccgacgagtacaaggtgcccagcaagaaattcaaggtgctgggcaacaccgaccggcacagcatcaagaagaacctgatcggcgccctgctgttcgacagcggagaaacagccgaggccacccggctgaagagaaccgccagaagaagatacaccagacggaagaaccggatctgctatctgcaagagatcttcagcaacgagatggccaaggtggacgacagcttcttccacagactggaagagtccttcctggtggaagaggataagaagcacgagcggcaccccatcttcggcaacatcgtggacgaggtggcctaccacgagaagtaccccaccatctaccacctgagaaagaaactggtggacagcaccgacaaggccgacctgcggctgatctatctggccctggcccacatgatcaagttccggggccacttcctgatcgagggcgacctgaaccccgacaacagcgacgtggacaagctgttcatccagctggtgcagacctacaaccagctgttcgaggaaaaccccatcaacgccagcggcgtggacgccaaggccatcctgtctgccagactgagcaagagcagacggctggaaaatctgatcgcccagctgcccggcgagaagaagaatggcctgttcggcaacctgattgccctgagcctgggcctgacccccaacttcaagagcaacttcgacctggccgaggatgccaaactgcagctgagcaaggacacctacgacgacgacctggacaacctgctggcccagatcggcgaccagtacgccgacctgtttctggccgccaagaacctgtccgacgccatcctgctgagcgacatcctgagagtgaacaccgagatcaccaaggcccccctgagcgcctctatgatcaagagatacgacgagcaccaccaggacctgaccctgctgaaagctctcgtgcggcagcagctgcctgagaagtacaaagagattttcttcgaccagagcaagaacggctacgccggctacatcgatggcggagccagccaggaagagttctacaagttcatcaagcccatcctggaaaagatggacggcaccgaggaactgctcgtgaagctgaacagagaggacctgctgcggaagcagcggaccttcgacaacggcagcatcccccaccagatccacctgggagagctgcacgccattctgcggcggcaggaagatttttacccattcctgaaggacaaccgggaaaagatcgagaagatcctgaccttccgcatcccctactacgtgggccctctggccaggggaaacagcagattcgcctggatgaccagaaagagcgaggaaaccatcaccccctggaacttcgaggaagtggtggacaagggcgccagcgcccagagcttcatcgagcggatgaccaacttcgataagaacctgcccaacgagaaggtgctgcccaagcacagcctgctgtacgagtacttcaccgtgtacaacgagctgaccaaagtgaaatacgtgaccgagggaatgagaaagcccgccttcctgagcggcgagcagaaaaaagccatcgtggacctgctgttcaagaccaaccggaaagtgaccgtgaagcagctgaaagaggactacttcaagaaaatcgagtgcttcgactccgtggaaatctccggcgtggaagatcggttcaacgcctccctgggcacataccacgatctgctgaaaattatcaaggacaaggacttcctggacaatgaggaaaacgaggacattctggaagatatcgtgctgaccctgacactgtttgaggacagagagatgatcgaggaacggctgaaaacctatgcccacctgttcgacgacaaagtgatgaagcagctgaagcggcggagatacaccggctggggcaggctgagccggaagctgatcaacggcatccgggacaagcagtccggcaagacaatcctggatttcctgaagtccgacggcttcgccaacagaaacttcatgcagctgatccacgacgacagcctgacctttaaagaggacatccagaaagcccaggtgtccggccagggcgatagcctgcacgagcacattgccaatctggccggcagccccgccattaagaagggcatcctgcagacagtgaaggtggtggacgagctcgtgaaagtgatgggccggcacaagcccgagaacatcgtgatcgaaatggccagagagaaccagaccacccagaagggacagaagaacagccgcgagagaatgaagcggatcgaagagggcatcaaagagctgggcagccagatcctgaaagaacaccccgtggaaaacacccagctgcagaacgagaagctgtacctgtactacctgcagaatgggcgggatatgtacgtggaccaggaactggacatcaaccggctgtccgactacgatgtggacgctatcgtgcctcagagctttctgaaggacgactccatcgataacaaagtgctgactcggagcgacaagaaccggggcaagagcgacaacgtgccctccgaagaggtcgtgaagaagatgaagaactactggcgccagctgctgaatgccaagctgattacccagaggaagttcgacaatctgaccaaggccgagagaggcggcctgagcgaactggataaggccggcttcatcaagagacagctggtggaaacccggcagatcacaaagcacgtggcacagatcctggactcccggatgaacactaagtacgacgagaacgacaaactgatccgggaagtgaaagtgatcaccctgaagtccaagctggtgtccgatttccggaaggatttccagttttacaaagtgcgcgagatcaacaactaccaccacgcccacgacgcctacctgaacgccgtcgtgggaaccgccctgatcaaaaagtaccctaagctggaaagcgagttcgtgtacggcgactacaaggtgtacgacgtgcggaagatgatcgccaagagcgagcaggaaatcggcaaggctaccgccaagtacttcttctacagcaacatcatgaactttttcaagaccgagattaccctggccaacggcgagatccggaagcggcctctgatcgagacaaacggcgaaacaggcgagatcgtgtgggataagggccgggactttgccaccgtgcggaaagtgctgtctatgccccaagtgaatatcgtgaaaaagaccgaggtgcagacaggcggcttcagcaaagagtctatcctgcccaagaggaacagcgacaagctgatcgccagaaagaaggactgggaccctaagaagtacggcggcttcgacagccccaccgtggcctattctgtgctggtggtggccaaagtggaaaagggcaagtccaagaaactgaagagtgtgaaagagctgctggggatcaccatcatggaaagaagcagcttcgagaagaatcccatcgactttctggaagccaagggctacaaagaagtgaaaaaggacctgatcatcaagctgcctaagtactccctgttcgagctggaaaacggccggaagagaatgctggcctctgccggcgaactgcagaagggaaacgaactggccctgccctccaaatatgtgaacttcctgtacctggccagccactatgagaagctgaagggctcccccgaggataatgagcagaaacagctgtttgtggaacagcacaaacactacctggacgagatcatcgagcagatcagcgagttctccaagagagtgatcctggccgacgctaatctggacaaggtgctgagcgcctacaacaagcacagagacaagcctatcagagagcaggccgagaatatcatccacctgtttaccctgaccaatctgggagcccctgccgccttcaagtactttgacaccaccatcgaccggaagaggtacaccagcaccaaagaggtgctggacgccaccctgatccaccagagcatcaccggcctgtacgagacacggatcgacctgtctcagctgggaggcgacagcggaagtgagaccccaggtacatccgaatcagcaacgcctgaaagcaccggtatgaacaattcacaggggagagtgacattcgaagacgtgaccgtgaacttcacccagggagaatggcagcgcttgaacccagaacaaaggaacctctatcgggacgtgatgctggaaaactactcaaatttggtgagcgttgggcagggtgagaccactaagcctgacgtgatcctgagattggaacagggcaaggagccttggctcgaggaagaggaagtcctgggctcagggagggccgagaaaaacggtgatataggaggccagatatggaagcctaaggacgtcaaggagagcctgagcgctgattacaaagatgatgacgataaagccccaaaaaagaagagaaaggtaccgaagaaaaaaagaaaggtctga

1. A system for repressing transcription of a human B2M gene in a human cell, optionally a human T lymphocyte or a human NK cell, comprising
a) one or more fusion proteins that collectively comprise
a DNA methyltransferase (DNMT) domain and/or a domain that recruits a DNMT, optionally wherein the DNMT domain and/or the recruiter domain comprise a DNMT3A domain and/or a DNMT3L domain, and optionally wherein the recruited DNMT is DNMT3A, and
a transcriptional repressor domain,
each domain being linked to a DNA-binding domain that binds to a target region in the human B2M gene, wherein the target region comprises one or more sequences selected from SEQ ID NOs: 700-740, 744, 747-749, 752, 753, 757, 758, 760-806, 812-822, 825, 827, 830, 833, 834, 839-841, 843-845, 849, 851-853, 855, 864, 866-877, 879-883, 891-896, 898-900, 903-914, 922, 923, 925-927, 934, 936, 943-947, 949, 951-962, 975-981, 983, 985, 987-989, 995, 997-999, 1003-1005, and 1007-1011, or
b) one or more nucleic acid molecules encoding the one or more fusion proteins, wherein the system does not generate a DNA break in the B2M gene.

2. The system of claim 1, wherein the DNA-binding domain comprises a dead CRISPR Cas (dCas) domain, a ZFP domain, or a TALE domain.

3. The system of claim 2, wherein the DNA-binding domain comprises a dCas9 domain and the system further comprises (i) one or more guide RNAs comprising any one of SEQ ID NOs: 710, 741-747, 749-759, 770-780, 782-1007, 1015, 1018-1020, 1023, 1024, 1028, 1029, 1031-1077, 1083-1093, 1096, 1098, 1101, 1104, 1105, 1110-1112, 1114-1116, 1120, 1122-1124, 1126, 1135, 1137-1148, 1150-1154, 1162-1167, 1169-1171, 1174-1185, 1193, 1194, 1196-1198, 1205, 1207, 1214-1218, 1220, 1222-1233, 1246-1252, 1254, 1256, 1258-1260, 1266, 1268-1270, 1274-1276, 1278-1282, and 1735-1737, or (ii) nucleic acid molecules coding for the one or more guide RNAs.

4. The system of claim 2 or 3, wherein the DNA-binding domain comprises a dCas9 domain and the system further comprises (i) two guide RNAs comprising any two of SEQ ID NOs: 710, 741-747, 749-759, 770-780, 782-1007, 1015, 1018-1020, 1023, 1024, 1028, 1029, 1031-1077, 1083-1093, 1096, 1098, 1101, 1104, 1105, 1110-1112, 1114-1116, 1120, 1122-1124, 1126, 1135, 1137-1148, 1150-1154, 1162-1167, 1169-1171, 1174-1185, 1193, 1194, 1196-1198, 1205, 1207, 1214-1218, 1220, 1222-1233, 1246-1252, 1254, 1256, 1258-1260, 1266, 1268-1270, 1274-1276, 1278-1282, and 1735-1737, or (ii) nucleic acid molecules coding for the two guide RNAs.

5. The system of claim 2 or 3, wherein the DNA-binding domain comprises a dCas9 domain and the system further comprises (i) three guide RNAs comprising any three of SEQ ID NOs: 710, 741-747, 749-759, 770-780, 782-1007, 1015, 1018-1020, 1023, 1024, 1028, 1029, 1031-1077, 1083-1093, 1096, 1098, 1101, 1104, 1105, 1110-1112, 1114-1116, 1120, 1122-1124, 1126, 1135, 1137-1148, 1150-1154, 1162-1167, 1169-1171, 1174-1185, 1193, 1194, 1196-1198, 1205, 1207, 1214-1218, 1220, 1222-1233, 1246-1252, 1254, 1256, 1258-1260, 1266, 1268-1270, 1274-1276, 1278-1282, and 1735-1737, or (ii) nucleic acid molecules coding for the three guide RNAs.

6. A system for repressing transcription of a human B2M gene in a human cell, optionally a human T lymphocyte or a human NK cell, comprising
a) a fusion protein that comprises
a DNMT3A domain,
a DNMT3L domain,
a DNA-binding domain, and
a transcriptional repressor domain, or
b) a nucleic acid molecule encoding the fusion protein,
wherein the system does not generate a DNA break in the B2M gene.

7. The system of claim 6, wherein the DNA-binding domain comprises a dead CRISPR Cas (dCas) domain, a ZFP domain, or a TALE domain.

8. The system of claim 7, wherein the DNA-binding domain comprises a dCas9 domain and the system further comprises (i) one or more guide RNAs comprising any one of SEQ ID NOs: 1012-1282, or (ii) nucleic acid molecules coding for the one or more guide RNAs.

9. The system of any one of claims 2, 3, 4, 5, 7 and 8, wherein the dCas domain comprises a dCas9 sequence, optionally a sequence with at least 90% identity to SEQ ID NO: 12 or 13.

10. The system of any one of claims 1-9, wherein the DNA-binding domain binds to a target sequence in SEQ ID NO: 1283 or 1284.

11. The system of claim 2 or 7, wherein the ZFP domain targets a nucleotide sequence selected from SEQ ID NOs: 700-740.

12. The system of any one of claims 1-11, wherein the DNMT3A domain comprises a sequence with at least 90% identity to SEQ ID NO: 574 or 575.

13. The system of any one of claims 1-12, wherein the DNMT3L domain comprises a sequence with at least 90% identity to a sequence selected from SEQ ID NOs: 578-581.

14. The system of any one of claims 1-12, wherein the DNMT3L domain comprises a sequence with at least 90% identity to a sequence selected from SEQ ID NOs: 582-603.

15. The system of any one of claims 1-5 and 7-11, wherein the DNMT domain comprises a sequence with at least 90% identity to a sequence selected from SEQ ID NOs: 601-603.

16. The system of any one of claims 1-15, wherein the transcriptional repressor domain comprises a sequence with at least 90% identity to a sequence selected from SEQ ID NOs: 33-570.

17. The system of any one of claims 1-15, wherein the transcriptional repressor domain comprises a KRAB domain derived from KOX1, ZIM3, ZFP28, or ZN627.

18. The system of claim 17, wherein the KRAB domain comprises a sequence with at least 90% identity to a sequence selected from SEQ ID NOs: 89, 116, 245, and 255.

19. The system of any one of claims 1-15, wherein the transcriptional repressor domain comprises a fusion of the N- and C-terminal regions of ZIM3 and KOX1 KRAB, and optionally comprises the amino acid sequence of SEQ ID NO: 571 or 572.

20. The system of any one of claims 1-15, wherein the transcriptional repressor domain is derived from KAP1, MECP2, HP1a/CBX5, HP1b, CBX8, CDYL2, TOX, TOX3, TOX4, EED, EZH2, RBBP4, RCOR1, or SCML2.

21. The system of any one of claims 1-20, wherein the system comprises
a) a fusion protein comprising the DNMT3A domain, the DNMT3L domain, the transcriptional repressor domain, and the DNA-binding domain,
optionally wherein one or both of the DNMT3A domain and the DNMT3L domain are human, and
optionally wherein the DNA-binding domain is a dead CRISPR Cas domain or a ZFP domain; or
b) a nucleic acid molecule encoding the fusion protein.

22. The system of claim 21, wherein the fusion protein comprises, from N-terminus to C-terminus, the DNMT3A domain, a first peptide linker, the DNMT3L domain, a second peptide linker, the DNA-binding domain, a third peptide linker, and the transcriptional repressor domain.

23. The system of claim 21, wherein the fusion protein comprises, from N-terminus to C-terminus, the DNMT3A domain, the first peptide linker, the DNMT3L domain, the second peptide linker, a first nuclear localization signal (NLS), the DNA-binding domain, a second NLS, the third peptide linker, and the transcriptional repressor domain.

24. The system of claim 21, wherein the fusion protein comprises, from N-terminus to C-terminus, a first nuclear localization signal (NLS), the DNMT3A domain, the first peptide linker, the DNMT3L domain, the second peptide linker, the DNA-binding domain, the third peptide linker, the transcriptional repressor domain, and a second NLS.

25. The system of claim 21, wherein the fusion protein comprises, from N-terminus to C-terminus, first and second nuclear localization signals (NLSs), the DNMT3A domain, the first peptide linker, the DNMT3L domain, the second peptide linker, the DNA-binding domain, the third peptide linker, the transcriptional repressor domain, and third and fourth NLSs.

26. The system of any one of claims 21-25, wherein the transcriptional repressor domain is a KRAB domain, optionally a human KOX1, ZFP28, ZN627, or ZIM3 KRAB domain.

27. The system of any one of claims 22-26, wherein one or both of the second and third peptide linkers are XTEN linkers, optionally selected from XTEN80 and XTEN16, and further optionally wherein the second peptide linker is XTEN80, and the third peptide linker is XTEN16.

28. The system of claim 21, wherein the fusion protein comprises, from N-terminus to C-terminus, a human DNMT3A domain, a first peptide linker, a human DNMT3L domain, an XTEN80 peptide linker, a first NLS, a dSpCas9 domain, a second NLS, an XTEN16 peptide linker, and a human KOX1 KRAB domain.

29. The system of claim 28, wherein the fusion protein comprises SEQ ID NO: 658 or a sequence at least 90% identical thereto.

30. The system of claim 21, wherein the fusion protein comprises, from N-terminus to C-terminus, a human DNMT3A domain, a first peptide linker, a human DNMT3L domain, an XTEN80 peptide linker, a first NLS, a ZFP domain, a second NLS, an XTEN16 linker, and a human KOX1 KRAB domain.

31. The system of claim 30, wherein the fusion protein comprises SEQ ID NO: 659 or a sequence at least 90% identical thereto.

32. The system of claim 21, wherein the fusion protein comprises, from N-terminus to C-terminus, first and second NLSs, a human DNMT3A domain, a first peptide linker, a human DNMT3L domain, an XTEN80 peptide linker, a dSpCas9 domain, an XTEN16 peptide linker, a human KOX1 KRAB domain, and third and fourth NLSs.

33. The system of claim 32, wherein the fusion protein comprises SEQ ID NO: 660 or a sequence at least 90% identical thereto.

34. The system of claim 21, wherein the fusion protein comprises, from N-terminus to C-terminus, first and second NLSs, a human DNMT3A domain, a first peptide linker, a human DNMT3L domain, an XTEN80 peptide linker, a ZFP domain, an XTEN16 peptide linker, a human KOX1 KRAB domain, and third and fourth NLSs.

35. The system of claim 21, wherein the fusion protein comprises, from N-terminus to C-terminus, first and second NLSs, a human DNMT3A domain, a first peptide linker, a human DNMT3L domain, an XTEN80 peptide linker, a dSpCas9 domain, an XTEN16 peptide linker, a human ZFP28 KRAB domain, and third and fourth NLSs.

36. The system of claim 35, wherein the fusion protein comprises SEQ ID NO: 661 or a sequence at least 90% identical thereto.

37. The system of claim 21, wherein the fusion protein comprises, from N-terminus to C-terminus, first and second NLSs, a human DNMT3A domain, a first peptide linker, a human DNMT3L domain, an XTEN80 peptide linker, a ZFP domain, an XTEN16 peptide linker, a human ZFP28 KRAB domain, and third and fourth NLSs.

38. The system of claim 21, wherein the fusion protein comprises, from N-terminus to C-terminus, first and second NLSs, a human DNMT3A domain, a first peptide linker, a human DNMT3L domain, an XTEN80 peptide linker, a dSpCas9 domain, an XTEN16 peptide linker, a human ZN627 KRAB domain, and third and fourth NLSs.

39. The system of claim 38, wherein the fusion protein comprises SEQ ID NO: 662 or a sequence at least 90% identical thereto.

40. The system of claim 21, wherein the fusion protein comprises, from N-terminus to C-terminus, first and second NLSs, a human DNMT3A domain, a first peptide linker, a human DNMT3L domain, an XTEN80 peptide linker, a ZFP domain, an XTEN16 peptide linker, a human ZN627 KRAB domain, and third and fourth NLSs.

41. The system of claim 21, wherein the fusion protein comprises, from N-terminus to C-terminus, first and second NLSs, a human DNMT3A domain, a first peptide linker, a human DNMT3L domain, an XTEN80 peptide linker, a dSpCas9 domain, an XTEN16 peptide linker, a human ZIM3 KRAB domain, and third and fourth NLSs.

42. The system of claim 41, wherein the fusion protein comprises SEQ ID NO: 663 or a sequence at least 90% identical thereto or SEQ ID NO: 667 or a sequence at least 90% identical thereto.

43. The system of claim 21, wherein the fusion protein comprises, from N-terminus to C-terminus, first and second NLSs, a human DNMT3A domain, a first peptide linker, a human DNMT3L domain, an XTEN80 peptide linker, a ZFP domain, an XTEN16 peptide linker, a human ZIM3 KRAB domain, and third and fourth NLSs.

44. The system of any one of claims 23-43, wherein at least one of the NLSs is an SV40 NLS.

45. The system of any one of claims 1-5 and 9-20, wherein the system comprises:
a) a first fusion protein comprising a first DNA-binding domain and comprising or recruiting the DNMT3A domain,
a second fusion protein comprising a second DNA-binding domain and comprising or recruiting the DNMT3L domain, and
a third fusion protein comprising a third DNA-binding domain and comprising or recruiting the transcriptional repressor domain; or
b) one or more nucleic acid molecules encoding the fusion proteins.

46. A human cell comprising the system of any one of claims 1-45, or progeny of the cell, optionally wherein the cell is a T lymphocyte or a NK cell.

47. A human cell modified by the system of any one of claims 1-45, or progeny of the cell, optionally wherein the cell is a T lymphocyte or a NK cell, optionally wherein the cell was modified ex vivo.

48. A pharmaceutical composition comprising the system of any one of claims 1-45 and a pharmaceutically acceptable excipient, optionally wherein
the composition comprises lipid nanoparticles (LNPs) comprising the system, and/or
the DNA-binding domain is a dCas domain and the LNPs further comprise one or more gRNAs.

49. A pharmaceutical composition comprising human cells of claim 46 or 47 and a pharmaceutically acceptable excipient.

50. A method of treating a patient in need thereof, comprising administering the system of any one of claims 1-45, human cells of claim 46 or 47, or the pharmaceutical composition of claim 48 or 49 to the patient.

51. The method of claim 50, wherein the patient has cancer or autoimmune disease.

52. The system of any one of claims 1-45, human cells of claim 46 or 47, or the pharmaceutical composition of claim 48 or 49, for use in treating a patient in need thereof, optionally in the method of claim 50 or 51.

53. Use of the system of any one of claims 1-45 or the human cells of claim 46 or 47 in the manufacture of a medicament for treating a patient in need thereof, optionally in the method of claim 50 or 51.
